(19) United States
(12) Patent Application Publication
(10) Pub. No.: US 2026/0015411 A1
(43) Pub. Date: Jan. 15, 2026

(54) RNA COMPOSITIONS TARGETING HIV

(71) Applicant: BioNTech SE, Mainz (DE)

(72) Inventors: Valentin Le Douce, Mörfelden-Walldorf (DE); Felix Tolksdorf, Wiesbaden (DE); Johannes Nelke, Mainz (DE); Gábor Boros, Mainz (DE); Jonas Reinholz, Nierstein (DE); Katalin Karikó, Rydal, PA (US); Sergey Bessonov, Huerth (DE)

(21) Appl. No.: 18/865,241

(22) PCT Filed: May 13, 2023
(86) PCT No.: PCT/IB2023/054957

§ 371 Date: Nov. 12, 2024

Related U.S. Application Data
(60) Provisional application No. 63/342,057, filed on May 13, 2022.

(51) Int. Cl. C07K 16/10; A61K 9/51; A61K 39/00; A61P 31/18

(52) U.S. Cl. CPC C07K 16/1045; A61K 9/5123; A61P 31/18; A61K 2039/505; C07K 2317/52; C07K 2317/522; C07K 2317/526; C07K 2317/622; C07K 2317/76

(57) ABSTRACT

The present disclosure provides compositions (e.g., pharmaceutical compositions) for delivery of anti-HIV antibody agents and related technologies (e.g., components thereof and/or methods relating thereto). Among other things, the present disclosure provides polyribonucleotides encoding an immunoglobulin chain of an anti-HIV antibody agent.

### CROSS REFERENCE TO RELATED APPLICATIONS

[0001] This application is the National Stage of International Application No. PCT/IB23/54957 filed May 13, 2023, which claims the benefit of U.S. Provisional Application No. 63/342,057, filed May 13, 2022, the contents of which is hereby incorporated by reference in its entirety.

### BACKGROUND

[0002] Human Immunodeficiency Virus (HIV) is an infectious virus associated with Acquired Immune Deficiency Syndrome (AIDS). According to the World Health Organization, over 37 million people worldwide are currently affected with HIV. In 2020, approximately 680,000 people died from HIV-related causes and approximately 1.5 million people acquired HIV. There is currently no cure for HIV.

### SUMMARY

[0003] The present disclosure recognizes that HIV mutates rapidly. The highly mutable nature of HIV virons allows them to escape pressure from host immunity and/or treatment. To combat viral escape, combination therapies targeting HIV, including anti-HIV antibody agents, have been considered. However, the development of such combination therapies has been hindered by a number of challenges. First, development of individual HIV therapies is time consuming and expensive. For instance, anti-HIV antibody development is challenged by demanding and costly production, including purification and formulation methods associated with protein therapeutics. Second, combination therapies present regulatory challenges. In addition to ensuring that a combination therapy will be safe and efficacious, tight regulation over manufacture of the individual therapies, compounding of the multiple therapies together, and quality control during storage and administration complicate the use of combination therapies. Third, administration of antibodies to a subject can be painful and time consuming. Generally, antibodies are administered intravenously over a longer period of time. Administration of multiple antibodies can add to the complexity of antibody administration, increasing patient discomfort and taking up additional time. Finally, recombinant antibodies can have a short serum half-life.

[0004] The present disclosure provides insights that address these challenges, making it possible to not only deliver single anti-HIV antibody agents to a subject safely, reliably, and with strong potency, but also making it possible to deliver multiple anti-HIV therapeutics, including multiple anti-HIV antibody agents to a subject. For example, the present disclosure describes antibody agents or portions thereof (e.g., immunoglobulin chains) that are delivered to a subject via polyribonucleotides. An antibody agent that is delivered to a subject as one or more polyribonucleotides that encode the antibody agent are referred to herein as “RiboMabs.” After delivery of one or more polyribonucleotides that encode an antibody agent to a subject, the antibody agent, i.e., the RiboMab” is expressed by the subject's body. Further, the term “RibobNAb” refers to a RiboMab that comprises all or part of a broadly neutralizing antibody (bNAb), e.g., a broadly neutralizing antibody targeting HIV. Utilizing polyribonucleotides as a therapeutic agent (in contrast to administering an antibody agent itself) involves simpler and less expensive manufacturing processes. The less complex production of polyribonucleotides encoding antibody agent(s) (e.g., anti-HIV antibody agent(s)) can streamline manufacture (e.g., by circumventing the need for intensive glycan production and profiling), mitigating regulatory and production challenges associated with developing and using antibody agents themselves. Additionally, polyribonucleotides are effective at producing similar effects to recombinant proteins, but tend to require much lower volumes be administered to a subject. This is because polyribonucleotides encoding, e.g., anti-HIV antibody agent(s), can be administered to a subject and the subject's body produces the anti-HIV antibody agent(s) itself. Using a lower volume can provide a patient with a more pleasant experience and increase patient compliance with a treatment regimen. The present disclosure also provides technologies that address certain limitations of recombinant antibody technologies, including for example, the short serum half-life of recombinant antibodies by utilizing RNA technologies as a modality to express antibody agents directly in the patient's cells.

[0005] RiboMab technology also allows for two or more antibody agents to be administered to a subject simultaneously. Typically, an antibody produced by, e.g., humans, comprises four polypeptide chains—two “heavy” chains and two “light” chains. Each polypeptide chain (whether heavy or light) includes (1) a “variable” domain, having a sequence that varies among antibodies and a structure that determines the antigen to which an antibody binds, and (2) a “constant” domain(s), having a sequence and a structure that generally remain unchanged across antibodies of a given class, thus imparting little effect on antigen binding. In humans, specialized white blood cells, “B cells,” produce antibodies. Heavy chains and light chains are assembled to form an antibody through two key pairings: (1) the fragment crystallizable (Fc) domains of the two heavy chains pair together, and (2) the two light chains each pair with a heavy chain via disulfide linkages. During normal antibody production in a human, a single antibody is produced by a single B cell. In that situation, the correct pairing of heavy and light chains is ensured because only one species of heavy chain and one species of light chain are present in each B cell. However, the administration of a nucleic acid composition encoding more than one antibody agent to a subject requires the correct assembly of immunoglobulin chains (e.g., heavy chains and light chains) so that unwanted side products (e.g., antibody agents with unintended pairings) do not form.

[0006] Among other things, the present disclosure provides polyribonucleotides encoding an immunoglobulin chain of an antibody agent.

[0007] In one aspect, an immunoglobulin chain comprises a heavy chain variable (VH) domain. In some embodiments, a VH domain comprises a heavy chain complementarity determining region (HCDR)1 comprising an amino acid sequence according to SEQ ID NO: 6, an HCDR2 comprising an amino acid sequence according to SEQ ID NO: 9, and an HCDR3 comprising an amino acid sequence according to SEQ ID NO: 12.

[0008] In some embodiments, a VH domain comprises or consists of an amino acid sequence according to SEQ ID NO: 24. In some embodiments, a VH domain comprises an amino acid sequence having at least 85%, at least 90%, at least 95%, at least 96%, at least 97%, at least 98%, or at least 99% identity to an amino acid sequence according to SEQ ID NO: 24.

[0009] In some embodiments, a polyribonucleotide comprises a VH domain-encoding sequence. In some embodiments, a VH domain-encoding sequence comprises (a) the HCDR1-encoding sequence that comprises or consists of the ribonucleic acid sequence according to SEQ ID NO: 7, (b) the HCDR2-encoding sequence that comprises or consists of the ribonucleic acid sequence according to SEQ ID NO: 10, and (c) the HCDR3-encoding sequence that comprises or consists of the ribonucleic acid sequence according to SEQ ID NO: 13.

[0010] In some embodiments, a VH domain-encoding sequence comprises a ribonucleic acid sequence having at least 85%, at least 90%, at least 95%, at least 96%, at least 97%, at least 98%, or at least 99% identity to a ribonucleic acid sequence according to SEQ ID NO: 25. In some embodiments, a VH domain-encoding sequence comprises or consists of a ribonucleic acid sequence according to SEQ ID NO: 25. In some embodiments, a VH domain-encoding sequence comprises a ribonucleic acid sequence having at least 85%, at least 90%, at least 95%, at least 96%, at least 97%, at least 98%, or at least 99% identity to a ribonucleic acid sequence according to SEQ ID NO: 27. In some embodiments, a VH domain-encoding sequence comprises or consists of a ribonucleic acid sequence according to SEQ ID NO: 27.

[0011] In some embodiments, an immunoglobulin chain comprising a VH domain as described herein comprises one or more constant domains. In some embodiments, a VH domain is operably linked to one or more constant domains.

[0012] In some embodiments, an immunoglobulin chain comprising a VH domain as described herein comprises one or more constant domains. In some embodiments, a VH domain is operably linked to one or more constant domains.

[0013] In some embodiments, one or more constant domains comprise a CH2 domain. In some embodiments, a polyribonucleotide comprises a ribonucleic acid sequence that encodes the CH2 domain.

[0014] In some embodiments, one or more constant domains comprise a CH3 domain. In some embodiments, a polyribonucleotide comprises a ribonucleic acid sequence that encodes the CH3 domain.

[0015] In some embodiments, one or more constant domains comprise a hinge domain. In some embodiments, a polyribonucleotide comprises a ribonucleic acid sequence that encodes the hinge domain.

[0016] In some embodiments, one or more constant domains comprise a CH1 domain. In some embodiments, a polyribonucleotide comprises a ribonucleic acid sequence that encodes a CH1 domain.

[0017] In some embodiments, one or more constant domains comprise a CL domain. In some embodiments, a polyribonucleotide comprises a ribonucleic acid sequence that encodes a CL domain.

[0018] In some embodiments, an immunoglobulin chain comprising a VH domain as described herein comprises a CH1 domain, a hinge domain, a CH2 domain, and a CH3 domain.

[0019] In some embodiments, an immunoglobulin chain comprising a VH domain as described herein comprises a CL domain, a hinge domain, a CH2 domain, and a CH3 domain.

[0020] The present disclosure further provides a polyribonucleotide encoding an immunoglobulin chain of an antibody agent, where the immunoglobulin chain comprises a light chain variable (VL) domain.

[0021] In some embodiments, a VL domain comprises (a) a light chain complementarity determining region (LCDR)1 comprising an amino acid sequence according to SEQ ID NO: 15, (b) an LCDR2 comprising an amino acid sequence according to SEQ ID NO: 18 (GTS), and (c) an LCDR3 comprising an amino acid sequence according to SEQ ID NO: 21.

[0022] In some embodiments, a polyribonucleotide comprises a VL domain-encoding sequence. In some embodiments, a VL domain-encoding sequence comprises (a) an LCDR1-encoding sequence that comprises or consists of a ribonucleic acid sequence according to SEQ ID NO: 16, an LCDR2-encoding sequence that comprises or consists of a ribonucleic acid sequence according to SEQ ID NO: 19 (GGCACCAGC), and an LCDR3-encoding sequence that comprises or consists of a ribonucleic acid sequence according to SEQ ID NO: 22.

[0023] In some embodiments, a VL domain comprises or consists of an amino acid sequence according to SEQ ID NO: 29. In some embodiments, a VL domain-encoding sequence comprises or consists of a ribonucleic acid sequence according to SEQ ID NO: 30.

[0024] In some embodiments, an immunoglobulin chain comprising a VL domain further comprises a constant domain. In some embodiments, a VL domain is operably linked to a constant domain. In some embodiments, a polyribonucleotide comprises a ribonucleic acid sequence that encodes the constant domain.

[0025] In some embodiments, an immunoglobulin chain comprising a VL domain further comprises a CL domain. In some embodiments, a polyribonucleotide comprises a ribonucleic acid sequence that encodes the CL domain. In some embodiments, a CL domain is a kappa constant domain. In some embodiments, a polyribonucleotide comprises a ribonucleic acid sequence that encodes the light chain constant domain.

[0026] In some embodiments, an immunoglobulin chain comprising a VL domain further comprises a CH1 domain. In some embodiments, a polyribonucleotide comprises a ribonucleic acid sequence that encodes the CH1 domain.

[0027] Among other things, the present disclosure provides a polyribonucleotide encoding an immunoglobulin chain of an antibody agent, where the immunoglobulin chain comprises a heavy chain variable (VH) domain and a light chain variable (VL) domain. In some embodiments, VH domain comprises an HCDR1 comprising an amino acid sequence according to SEQ ID NO: 6, an HCDR2 comprising an amino acid sequence according to SEQ ID NO: 9, and an HCDR3 comprising an amino acid sequence according to SEQ ID NO: 12. In some embodiments, a VL domain comprises an LCDR1 comprising an amino acid sequence according to SEQ ID NO: 15, an LCDR2 comprising an amino acid sequence according to SEQ ID NO: 18 (GTS), and an LCDR3 comprising an amino acid sequence according to SEQ ID NO: 21.

[0028] In some embodiments, a polyribonucleotide comprises a VH domain-encoding sequence and a VL domain-encoding sequence. In some embodiments, a VH domain-encoding sequence comprises an HCDR1-encoding sequence that comprises or consists of the ribonucleic acid sequence according to SEQ ID NO: 7, the HCDR2-encoding sequence that comprises or consists of the ribonucleic acid sequence according to SEQ ID NO: 10, and the HCDR3-encoding sequence that comprises or consists of the ribonucleic acid sequence according to SEQ ID NO: 13. In some embodiments, a VL domain-encoding sequence comprises an LCDR1-encoding sequence that comprises or consists of a ribonucleic acid sequence according to SEQ ID NO: 16, an LCDR2-encoding sequence that comprises or consists of a ribonucleic acid sequence according to SEQ ID NO: 19 (GGCACCAGC), and an LCDR3-encoding sequence that comprises or consists of a ribonucleic acid sequence according to SEQ ID NO: 22.

[0029] In some embodiments, an immunoglobulin chain comprises a single chain fragment variable (scFv). In some embodiments, an scFv comprises a VH domain, a linker, and a VL domain.

[0030] In some embodiments, an scFv comprises, in order, a VH domain, a linker, and a VL domain. In some embodiments, an scFv comprises, in order, a VH domain comprising or consisting of an amino acid sequence according to SEQ ID NO: 24, a linker, and a VL domain comprising or consisting of an amino acid sequence according to SEQ ID NO: 29.

[0031] In some embodiments, an scFv comprises, in order, a VL domain, a linker, and a VH domain. In some embodiments, an scFv comprises, in order, a VL domain comprising or consisting of an amino acid sequence according to SEQ ID NO: 29, a linker, and a VH domain comprising or consisting of an amino acid sequence according to SEQ ID NO: 24.

[0032] In some embodiments, a linker comprises an amino acid sequence according to SEQ ID NO: 32. In some embodiments, a polyribonucleotide comprises a ribonucleic acid sequence that encodes the linker and comprises or consists of a sequence according to SEQ ID NO: 33.

[0033] In some embodiments, a linker comprises an amino acid sequence according to SEQ ID NO: 35. In some embodiments, a polyribonucleotide comprises a ribonucleic acid sequence that encodes the linker and comprises or consists of a sequence according to SEQ ID NO: 36.

[0034] In some embodiments, an immunoglobulin chain comprising a VH domain and a VL domain as described herein comprises one or more constant domains. In some embodiments, a VH domain and a VL domain are operably linked to one or more constant domains.

[0035] In some embodiments, an immunoglobulin chain comprises one or more constant domains, and a hinge domain is between the scFv and the one or more constant domains.

[0036] In some embodiments, one or more constant domains comprise a CH2 domain. In some embodiments, a polyribonucleotide comprises a ribonucleic acid sequence that encodes the CH2 domain.

[0037] In some embodiments, one or more constant domains comprise a CH3 domain. In some embodiments, a polyribonucleotide comprises a ribonucleic acid sequence that encodes the CH3 domain.

[0038] In some embodiments, one or more constant domains comprise a hinge domain. In some embodiments, a polyribonucleotide comprises a ribonucleic acid sequence that encodes the hinge domain.

[0039] In some embodiments, one or more constant domains comprise a CH1 domain. In some embodiments, a polyribonucleotide comprises a ribonucleic acid sequence that encodes a CH1 domain.

[0040] According to the present disclosure, a CH2 domain of any of the embodiments above can comprise an amino acid sequence having at least 85%, at least 90%, at least 95%, at least 96%, at least 97%, at least 98%, or at least 99% identity to an amino acid sequence according to SEQ ID NO: 53. In some embodiments, a CH2 domain comprises or consists of an amino acid sequence according to SEQ ID NO: 53.

[0041] In some embodiments, a ribonucleic acid sequence that encodes a CH2 domain comprises a ribonucleic acid sequence having at least 85%, at least 90%, at least 95%, at least 96%, at least 97%, at least 98%, or at least 99% identity to a ribonucleic acid sequence according to SEQ ID NO: 54. In some embodiments, a ribonucleic acid sequence that encodes the CH2 domain comprises or consists of a sequence according to SEQ ID NO: 54.

[0042] In some embodiments, a CH2 domain comprises one or more substitution mutations. In some embodiments, one or more substitution mutations in a CH2 domain comprise or consist of G236A, A330L, I332E, or a combination thereof, and wherein the substitution mutation positions are according to EU numbering. In some embodiments, one or more substitution mutations in a CH2 domain comprise or consist of G236A, and wherein the substitution mutation positions are according to EU numbering. In some embodiments, one or more substitution mutations in a CH2 domain comprise or consist of I332E, and wherein the substitution mutation positions are according to EU numbering. In some embodiments, one or more substitution mutations in a CH2 domain comprise or consist of G236A and I332E, and wherein the substitution mutation positions are according to EU numbering. In some embodiments, one or more substitution mutations in a CH2 domain comprise or consist of G236A, A330L, and I332E, and wherein the substitution mutation positions are according to EU numbering.

[0043] In some embodiments, a CH2 domain comprises an amino acid sequence having at least 85%, at least 90%, at least 95%, at least 96%, at least 97%, at least 98%, or at least 99% identity to an amino acid sequence according to SEQ ID NO: 56. In some embodiments, a CH2 domain comprises or consists of an amino acid sequence according to SEQ ID NO: 56.

[0044] In some embodiments, a polyribonucleotide comprises a ribonucleic acid sequence that encodes a CH2 domain with a ribonucleic acid sequence having at least 85%, at least 90%, at least 95%, at least 96%, at least 97%, at least 98%, or at least 99% identity to a ribonucleic acid sequence according to SEQ ID NO: 57. In some embodiments, a polyribonucleotide comprises a ribonucleic acid sequence that encodes a CH2 domain and comprises or consists of a sequence according to SEQ ID NO: 57.

[0045] In some embodiments, a CH2 domain comprises an amino acid sequence having at least 85%, at least 90%, at least 95%, at least 96%, at least 97%, at least 98%, or at least 99% identity to an amino acid sequence according to SEQ ID NO: 59. In some embodiments, a CH2 domain comprises or consists of an amino acid sequence according to SEQ ID NO: 59.

[0046] In some embodiments, a polyribonucleotide comprises a ribonucleic acid sequence that encodes a CH2 domain and has at least 85%, at least 90%, at least 95%, at least 96%, at least 97%, at least 98%, or at least 99% identity to a ribonucleic acid sequence according to SEQ ID NO: 60. In some embodiments, a polyribonucleotide comprises a ribonucleic acid sequence that encodes a CH2 domain and comprises or consists of a sequence according to SEQ ID NO: 60.

[0047] In some embodiments, a CH2 domain comprises an amino acid sequence having at least 85%, at least 90%, at least 95%, at least 96%, at least 97%, at least 98%, or at least 99% identity to an amino acid sequence according to SEQ ID NO: 62. In some embodiments, a CH2 domain comprises or consists of an amino acid sequence according to SEQ ID NO: 62.

[0048] In some embodiments, a polyribonucleotide comprises a ribonucleic acid sequence that encodes a CH2 domain and has at least 85%, at least 90%, at least 95%, at least 96%, at least 97%, at least 98%, or at least 99% identity to a ribonucleic acid sequence according to SEQ ID NO: 63. In some embodiments, a polyribonucleotide comprises a ribonucleic acid sequence that encodes a CH2 domain and comprises or consists of a sequence according to SEQ ID NO: 63.

[0049] In some embodiments, a CH2 domain comprises an amino acid sequence having at least 85%, at least 90%, at least 95%, at least 96%, at least 97%, at least 98%, or at least 99% identity to an amino acid sequence according to SEQ ID NO: 65. In some embodiments, a CH2 domain comprises or consists of an amino acid sequence according to SEQ ID NO: 65.

[0050] In some embodiments, a polyribonucleotide comprises a ribonucleic acid sequence that encodes the CH2 domain and has at least 85%, at least 90%, at least 95%, at least 96%, at least 97%, at least 98%, or at least 99% identity to a ribonucleic acid sequence according to SEQ ID NO: 66. In some embodiments, a polyribonucleotide comprises a ribonucleic acid sequence that encodes the CH2 domain and comprises or consists of a sequence according to SEQ ID NO: 66.

[0051] According to the present disclosure, a CH3 domain of any of the embodiments above can comprise an amino acid sequence having at least 85%, at least 90%, at least 95%, at least 96%, at least 97%, at least 98%, or at least 99% identity to an amino acid sequence according to SEQ ID NO: 68. In some embodiments, a CH3 domain comprises or consists of an amino acid sequence according to SEQ ID NO: 68.

[0052] In some embodiments, a polyribonucleotide comprises a ribonucleic acid sequence that encodes the CH3 domain and has at least 85%, at least 90%, at least 95%, at least 96%, at least 97%, at least 98%, or at least 99% identity to a ribonucleic acid sequence according to SEQ ID NO: 69. In some embodiments, a polyribonucleotide comprises a ribonucleic acid sequence that encodes the CH3 domain and comprises or consists of a sequence according to SEQ ID NO: 69.

[0053] In some embodiments, a CH3 domain comprises an amino acid sequence having at least 85%, at least 90%, at least 95%, at least 96%, at least 97%, at least 98%, or at least 99% identity to an amino acid sequence according to SEQ ID NO: 71. In some embodiments, a CH3 domain comprises or consists of an amino acid sequence according to SEQ ID NO: 71.

[0054] In some embodiments, a polyribonucleotide comprises a ribonucleic acid sequence that encodes the CH3 domain and has at least 85%, at least 90%, at least 95%, at least 96%, at least 97%, at least 98%, or at least 99% identity to a ribonucleic acid sequence according to SEQ ID NO: 72. In some embodiments, a polyribonucleotide comprises a ribonucleic acid sequence that encodes the CH3 domain and comprises or consists of a sequence according to SEQ ID NO: 72.

[0055] In some embodiments, a CH3 domain comprises one or more substitution mutations. In some embodiments, one or more substitution mutations in a CH3 domain comprise or consist of M428L, N434S, or a combination thereof, and wherein the substitution mutation positions are according to EU numbering.

[0056] In some embodiments, a CH3 domain comprises or consists of an amino acid sequence according to SEQ ID NO: 74. In some embodiments, a polyribonucleotide comprises a ribonucleic acid sequence that encodes the CH3 domain and comprises or consists of a sequence according to SEQ ID NO: 75.

[0057] In some embodiments, a CH3 domain comprises an amino acid sequence having at least 85%, at least 90%, at least 95%, at least 96%, at least 97%, at least 98%, or at least 99% identity to an amino acid sequence according to SEQ ID NO: 77. In some embodiments, a CH3 domain comprises or consists of an amino acid sequence according to SEQ ID NO: 77.

[0058] In some embodiments, a polyribonucleotide comprises a ribonucleic acid sequence that encodes the CH3 domain and has at least 85%, at least 90%, at least 95%, at least 96%, at least 97%, at least 98%, or at least 99% identity to a ribonucleic acid sequence according to SEQ ID NO: 78. In some embodiments, a polyribonucleotide comprises a ribonucleic acid sequence that encodes the CH3 domain and comprises or consists of a sequence according to SEQ ID NO: 78.

[0059] In some embodiments, one or more substitution mutations in a CH3 domain comprise or consist of Y349C, T366S, L368A, Y407V, or a combination thereof, and wherein the substitution mutation positions are according to EU numbering. In some embodiments, one or more substitution mutations in a CH3 domain comprise or consist of Y349C, T366S, L368A, Y407V, M428L, N434S, or a combination thereof, and wherein the substitution mutation positions are according to EU numbering. In some embodiments, one or more substitution mutations in a CH3 domain comprise or consist of Y349C, T366S, L368A, Y407V, M428L, and N434S, and wherein the substitution mutation positions are according to EU numbering.

[0060] In some embodiments, a CH3 domain comprises an amino acid sequence having at least 85%, at least 90%, at least 95%, at least 96%, at least 97%, at least 98%, or at least 99% identity to an amino acid sequence according to SEQ ID NO: 80. In some embodiments, a CH3 domain comprises or consists of an amino acid sequence according to SEQ ID NO: 80.

[0061] In some embodiments, a polyribonucleotide comprises a ribonucleic acid sequence that encodes the CH3 domain and has at least 85%, at least 90%, at least 95%, at least 96%, at least 97%, at least 98%, or at least 99% identity to a ribonucleic acid sequence according to SEQ ID NO: 81. In some embodiments, a polyribonucleotide comprises a ribonucleic acid sequence that encodes the CH3 domain and comprises or consists of a sequence according to SEQ ID NO: 81.

[0062] In some embodiments, a CH3 domain comprises an amino acid sequence having at least 85%, at least 90%, at least 95%, at least 96%, at least 97%, at least 98%, or at least 99% identity to an amino acid sequence according to SEQ ID NO: 83. In some embodiments, a CH3 domain comprises or consists of an amino acid sequence according to SEQ ID NO: 83.

[0063] In some embodiments, a polyribonucleotide comprises a ribonucleic acid sequence that encodes the CH3 domain and has at least 85%, at least 90%, at least 95%, at least 96%, at least 97%, at least 98%, or at least 99% identity to a ribonucleic acid sequence according to SEQ ID NO: 84. In some embodiments, a polyribonucleotide comprises a ribonucleic acid sequence that encodes the CH3 domain and comprises or consists of a sequence according to SEQ ID NO: 84.

[0064] In some embodiments, one or more substitution mutations in a CH3 domain comprise or consist of S354C, T366W, or a combination thereof, and wherein the substitution mutation positions are according to EU numbering. In some embodiments, one or more substitution mutations in a CH3 domain comprise or consist of S354C, T366W, M428L, N434S, or a combination thereof, and wherein the substitution mutation positions are according to EU numbering. In some embodiments, one or more substitution mutations in a CH3 domain comprise or consist of S354C, T366W, M428L, and N434S, and wherein the substitution mutation positions are according to EU numbering.

[0065] In some embodiments, a CH3 domain comprises an amino acid sequence having at least 85%, at least 90%, at least 95%, at least 96%, at least 97%, at least 98%, or at least 99% identity to an amino acid sequence according to SEQ ID NO: 86. In some embodiments, a CH3 domain comprises or consists of an amino acid sequence according to SEQ ID NO: 86.

[0066] In some embodiments, a polyribonucleotide comprises a ribonucleic acid sequence that encodes the CH3 domain and has at least 85%, at least 90%, at least 95%, at least 96%, at least 97%, at least 98%, or at least 99% identity to a ribonucleic acid sequence according to SEQ ID NO: 87. In some embodiments, a polyribonucleotide comprises a ribonucleic acid sequence that encodes the CH3 domain and comprises or consists of a sequence according to SEQ ID NO: 87.

[0067] In some embodiments, a CH3 domain comprises an amino acid sequence having at least 85%, at least 90%, at least 95%, at least 96%, at least 97%, at least 98%, or at least 99% identity to an amino acid sequence according to SEQ ID NO: 89. In some embodiments, a CH3 domain comprises or consists of an amino acid sequence according to SEQ ID NO: 89.

[0068] In some embodiments, a polyribonucleotide comprises a ribonucleic acid sequence that encodes the CH3 domain and has at least 85%, at least 90%, at least 95%, at least 96%, at least 97%, at least 98%, or at least 99% identity to a ribonucleic acid sequence according to SEQ ID NO: 90. In some embodiments, a polyribonucleotide comprises a ribonucleic acid sequence that encodes the CH3 domain and comprises or consists of a sequence according to SEQ ID NO: 90.

[0069] According to the present disclosure, a hinge domain of any of the embodiments above can comprise an amino acid sequence having at least 85%, at least 90%, at least 95%, at least 96%, at least 97%, at least 98%, or at least 99% identity to an amino acid sequence according to SEQ ID NO: 104. In some embodiments, a hinge domain comprises or consists of an amino acid sequence according to SEQ ID NO: 104.

[0070] In some embodiments, a polyribonucleotide comprises a ribonucleic acid sequence that encodes the hinge domain and has at least 85%, at least 90%, at least 95%, at least 96%, at least 97%, at least 98%, or at least 99% identity to a ribonucleic acid sequence according to SEQ ID NO: 105. In some embodiments, a polyribonucleotide comprises a ribonucleic acid sequence that encodes the hinge domain and comprises or consists of a sequence according to SEQ ID NO: 105.

[0071] In some embodiments, a hinge domain comprises an amino acid sequence having at least 85%, at least 90%, at least 95%, at least 96%, at least 97%, at least 98%, or at least 99% identity to an amino acid sequence according to SEQ ID NO: 110. In some embodiments, a hinge domain comprises or consists of an amino acid sequence according to SEQ ID NO: 110.

[0072] In some embodiments, a polyribonucleotide comprises a ribonucleic acid sequence that encodes the hinge domain and has at least 85%, at least 90%, at least 95%, at least 96%, at least 97%, at least 98%, or at least 99% identity to a ribonucleic acid sequence according to SEQ ID NO: 111. In some embodiments, a polyribonucleotide comprises a ribonucleic acid sequence that encodes the hinge domain and comprises or consists of a sequence according to SEQ ID NO: 111.

[0073] In some embodiments, a hinge domain comprises an amino acid sequence having at least 85%, at least 90%, at least 95%, at least 96%, at least 97%, at least 98%, or at least 99% identity to an amino acid sequence according to SEQ ID NO: 107. In some embodiments, a hinge domain comprises or consists of an amino acid sequence according to SEQ ID NO: 107.

[0074] In some embodiments, a polyribonucleotide comprises a ribonucleic acid sequence that encodes the hinge domain and has at least 85%, at least 90%, at least 95%, at least 96%, at least 97%, at least 98%, or at least 99% identity to a ribonucleic acid sequence according to SEQ ID NO: 108. In some embodiments, a polyribonucleotide comprises a ribonucleic acid sequence that encodes the hinge domain and comprises or consists of a sequence according to SEQ ID NO: 108.

[0075] According to the present disclosure, a CH1 domain of any of the embodiments above can comprise an amino acid sequence having at least 85%, at least 90%, at least 95%, at least 96%, at least 97%, at least 98%, or at least 99% identity to an amino acid sequence according to SEQ ID NO: 38. In some embodiments, a CH1 domain comprises or consists of an amino acid sequence according to SEQ ID NO: 38.

[0076] In some embodiments, a polyribonucleotide comprises a ribonucleic acid sequence that encodes a CH1 domain and has at least 85%, at least 90%, at least 95%, at least 96%, at least 97%, at least 98%, or at least 99% identity to a ribonucleic acid sequence according to SEQ ID NO: 39. In some embodiments, a polyribonucleotide comprises a ribonucleic acid sequence that encodes a CH1 domain and comprises or consists of a sequence according to SEQ ID NO: 39.

[0077] In some embodiments, a CH1 domain comprises an amino acid sequence having at least 85%, at least 90%, at least 95%, at least 96%, at least 97%, at least 98%, or at least 99% identity to an amino acid sequence according to SEQ ID NO: 41. In some embodiments, a CH1 domain comprises or consists of an amino acid sequence according to SEQ ID NO: 41.

[0078] In some embodiments, a polyribonucleotide comprises a ribonucleic acid sequence that encodes a CH1 domain and has at least 85%, at least 90%, at least 95%, at least 96%, at least 97%, at least 98%, or at least 99% identity to a ribonucleic acid sequence according to SEQ ID NO: 42. In some embodiments, a polyribonucleotide comprises a ribonucleic acid sequence that encodes a CH1 domain and comprises or consists of a sequence according to SEQ ID NO: 42.

[0079] In some embodiments, a CH1 domain comprises one or more substitution mutations. In some embodiments, one or more substitution mutations in a CH1 domain comprise or consist of K147E, K213D, or a combination thereof, and wherein the substitution mutation positions are according to EU numbering.

[0080] In some embodiments, a CH1 domain comprises an amino acid sequence having at least 85%, at least 90%, at least 95%, at least 96%, at least 97%, at least 98%, or at least 99% identity to an amino acid sequence according to SEQ ID NO: 50. In some embodiments, a CH1 domain comprises or consists of an amino acid sequence according to SEQ ID NO: 50.

[0081] In some embodiments, a polyribonucleotide comprises a ribonucleic acid sequence that encodes the CH1 domain and has at least 85%, at least 90%, at least 95%, at least 96%, at least 97%, at least 98%, or at least 99% identity to a ribonucleic acid sequence according to SEQ ID NO: 51. In some embodiments, a polyribonucleotide comprises a ribonucleic acid sequence that encodes the CH1 domain and comprises or consists of a sequence according to SEQ ID NO: 51.

[0082] In some embodiments, a CH1 domain comprises an amino acid sequence having at least 85%, at least 90%, at least 95%, at least 96%, at least 97%, at least 98%, or at least 99% identity to an amino acid sequence according to SEQ ID NO: 44. In some embodiments, a CH1 domain comprises or consists of an amino acid sequence according to SEQ ID NO: 44.

[0083] In some embodiments, a polyribonucleotide comprises a ribonucleic acid sequence that encodes the CH1 domain and has at least 85%, at least 90%, at least 95%, at least 96%, at least 97%, at least 98%, or at least 99% identity to a ribonucleic acid sequence according to SEQ ID NO: 45. In some embodiments, a polyribonucleotide comprises a ribonucleic acid sequence that encodes the CH1 domain and comprises or consists of a sequence according to SEQ ID NO: 45.

[0084] In some embodiments, a CH1 domain comprises an amino acid sequence having at least 85%, at least 90%, at least 95%, at least 96%, at least 97%, at least 98%, or at least 99% identity to an amino acid sequence according to SEQ ID NO: 47. In some embodiments, a CH1 domain comprises or consists of an amino acid sequence according to SEQ ID NO: 47.

[0085] In some embodiments, a polyribonucleotide comprises a ribonucleic acid sequence that encodes the CH1 domain and has at least 85%, at least 90%, at least 95%, at least 96%, at least 97%, at least 98%, or at least 99% identity to a ribonucleic acid sequence according to SEQ ID NO: 48. In some embodiments, a polyribonucleotide comprises a ribonucleic acid sequence that encodes the CH1 domain and comprises or consists of a sequence according to SEQ ID NO: 48.

[0086] According to the present disclosure, a CL domain of any of the embodiments above can comprise an amino acid sequence having at least 85%, at least 90%, at least 95%, at least 96%, at least 97%, at least 98%, or at least 99% identity to an amino acid sequence according to SEQ ID NO: 92. In some embodiments, a CL domain of any of the embodiments above can comprise or consists of an amino acid sequence according to SEQ ID NO: 92.

[0087] In some embodiments, a polyribonucleotide comprises a ribonucleic acid sequence that encodes the CL domain and has at least 85%, at least 90%, at least 95%, at least 96%, at least 97%, at least 98%, or at least 99% identity to a ribonucleic acid sequence according to SEQ ID NO: 93. In some embodiments, a polyribonucleotide comprises a ribonucleic acid sequence that encodes the CL domain and comprises or consists of a sequence according to SEQ ID NO: 93.

[0088] In some embodiments, a polyribonucleotide comprises a ribonucleic acid sequence that encodes the light chain constant domain CL domain comprises one or more substitution mutations. In some embodiments, one or more substitution mutations in a CL domain comprise or consist of Q124E, and wherein the substitution mutation positions are according to EU numbering. In some embodiments, one or more substitution mutations in a CL domain comprise or consist of R108A, T109S, or a combination thereof, and wherein the substitution mutation positions are according to EU numbering. In some embodiments, one or more substitution mutations in a CL domain comprise or consist of R108A, T109S, Q124E or a combination thereof, and wherein the substitution mutation positions are according to EU numbering.

[0089] In some embodiments, a CL domain comprises an amino acid sequence having at least 85%, at least 90%, at least 95%, at least 96%, at least 97%, at least 98%, or at least 99% identity to an amino acid sequence according to SEQ ID NO: 95. In some embodiments, a CL domain comprises or consists of an amino acid sequence according to SEQ ID NO: 95.

[0090] In some embodiments, a polyribonucleotide comprises a ribonucleic acid sequence that encodes the light chain constant domain and has at least 85%, at least 90%, at least 95%, at least 96%, at least 97%, at least 98%, or at least 99% identity to a ribonucleic acid sequence according to SEQ ID NO: 96. In some embodiments, a polyribonucleotide comprises a ribonucleic acid sequence that encodes the light chain constant domain and comprises or consists of a sequence according to SEQ ID NO: 96.

[0091] In some embodiments, a CL domain comprises one or more substitution mutations. In some embodiments, one or more substitution mutations in a CL domain comprise or consist of E123K, Q124R, or a combination thereof, and wherein the substitution mutation positions are according to EU numbering.

[0092] In some embodiments, a CL domain comprises an amino acid sequence having at least 85%, at least 90%, at least 95%, at least 96%, at least 97%, at least 98%, or at least 99% identity to an amino acid sequence according to SEQ ID NO: 98. In some embodiments, a CL domain comprises or consists of an amino acid sequence according to SEQ ID NO: 98.

[0093] In some embodiments, a polyribonucleotide comprises a ribonucleic acid sequence that encodes the light chain constant domain and has at least 85%, at least 90%, at least 95%, at least 96%, at least 97%, at least 98%, or at least 99% identity to a ribonucleic acid sequence according to SEQ ID NO: 99. In some embodiments, a polyribonucleotide comprises a ribonucleic acid sequence that encodes the light chain constant domain and comprises or consists of a sequence according to SEQ ID NO: 99.

[0094] In some embodiments, a one or more substitution mutations in a CL domain comprise or consist of E123R, Q124K, or a combination thereof, and wherein the substitution mutation positions are according to EU numbering.

[0095] In some embodiments, a CL domain comprises an amino acid sequence having at least 85%, at least 90%, at least 95%, at least 96%, at least 97%, at least 98%, or at least 99% identity to an amino acid sequence according to SEQ ID NO: 101. In some embodiments, a CL domain comprises or consists of an amino acid sequence according to SEQ ID NO: 101.

[0096] In some embodiments, a polyribonucleotide comprises a ribonucleic acid sequence that encodes the light chain constant domain and has at least 85%, at least 90%, at least 95%, at least 96%, at least 97%, at least 98%, or at least 99% identity to a ribonucleic acid sequence according to SEQ ID NO: 102. In some embodiments, a polyribonucleotide comprises a ribonucleic acid sequence that encodes the light chain constant domain and comprises or consists of a sequence according to SEQ ID NO: 102.

[0097] In some embodiments, a polyribonucleotide as provided herein encodes an immunoglobulin chain, wherein:
[0098] (i) the polyribonucleotide comprises a ribonucleic acid sequence that encodes a CH2 domain, and the CH2 domain comprises one or more substitution mutations, wherein the one or more substitution mutations comprise or consist of G236A, A330L, I332E, or a combination thereof,
[0099] (ii) the polyribonucleotide comprises a ribonucleic acid sequence that encodes a CH3 domain, and the CH3 domain comprises one or more substitution mutations, wherein the one or more substitution mutations comprise or consist of Y349C, S354C, T366S, T366W, L368A, Y407V, M428L, N434S, or a combination thereof,
[0100] (iii) the polyribonucleotide comprises a ribonucleic acid sequence that encodes a CH1 domain, and the CH1 domain comprises one or more substitution mutations, wherein the one or more substitution mutations comprise or consist of K147E, K213D, or a combination thereof,
[0101] (iv) the polyribonucleotide comprises a ribonucleic acid sequence that encodes a CL domain, and the CL domain comprises one or more substitution mutations, wherein the one or more substitution mutations comprise or consist of R108A, T109S, E123K, E123R, Q124E, Q124K, Q124R, or a combination thereof, or
[0102] (v) a combination thereof;
[0103] wherein the substitution mutation positions are according to EU numbering.

[0104] In some embodiments, a polyribonucleotide as provided herein encodes an immunoglobulin chain that comprises an amino acid sequence having at least 85%, at least 90%, at least 95%, at least 96%, at least 97%, at least 98%, or at least 99% identity to an amino acid sequence according to SEQ ID NO: 614. In some embodiments, a polyribonucleotide as provided herein encodes an immunoglobulin chain that comprises or consists of an amino acid sequence according to SEQ ID NO: 614.

[0105] In some embodiments, a polyribonucleotide as provided herein comprises a ribonucleic acid sequence that is at least 85%, at least 90%, at least 95%, at least 96%, at least 97%, at least 98%, or at least 99% identity to a ribonucleic acid sequence according to SEQ ID NO: 613. In some embodiments, a polyribonucleotide comprises or consists of a ribonucleic acid sequence according to SEQ ID NO: 613.

[0106] In some embodiments, a polyribonucleotide as provided herein encodes an immunoglobulin chain that comprises an amino acid sequence having at least 85%, at least 90%, at least 95%, at least 96%, at least 97%, at least 98%, or at least 99% identity to an amino acid sequence according to SEQ ID NO: 617. In some embodiments, a polyribonucleotide as provided herein encodes an immunoglobulin chain that comprises or consists of an amino acid sequence according to SEQ ID NO: 617.

[0107] In some embodiments, a polyribonucleotide as provided herein comprises a ribonucleic acid sequence that is at least 85%, at least 90%, at least 95%, at least 96%, at least 97%, at least 98%, or at least 99% identical to a ribonucleic acid sequence according to SEQ ID NO: 616. In some embodiments, a polyribonucleotide as provided herein comprises or consists of a ribonucleic acid sequence according to SEQ ID NO: 616.

[0108] In some embodiments, a polyribonucleotide as provided herein encodes an immunoglobulin chain that comprises an amino acid sequence having at least 85%, at least 90%, at least 95%, at least 96%, at least 97%, at least 98%, or at least 99% identity to an amino acid sequence according to SEQ ID NO: 623. In some embodiments, a polyribonucleotide as provided herein encodes an immunoglobulin chain that comprises or consists of an amino acid sequence according to SEQ ID NO: 623.

[0109] In some embodiments, a polyribonucleotide as provided herein comprises a ribonucleic acid sequence that is at least 85%, at least 90%, at least 95%, at least 96%, at least 97%, at least 98%, or at least 99% identical to a ribonucleic acid sequence according to SEQ ID NO: 622. In some embodiments, a polyribonucleotide as provided herein comprises or consists of a ribonucleic acid sequence according to SEQ ID NO: 622.

[0110] In some embodiments, a polyribonucleotide as provided herein encodes an immunoglobulin chain that comprises an amino acid sequence having at least 85%, at least 90%, at least 95%, at least 96%, at least 97%, at least 98%, or at least 99% identity to an amino acid sequence according to SEQ ID NO: 626. In some embodiments, a polyribonucleotide as provided herein encodes an immunoglobulin chain that comprises or consists of an amino acid sequence according to SEQ ID NO: 626.

[0111] In some embodiments, a polyribonucleotide as provided herein comprises a ribonucleic acid sequence that is at least 85%, at least 90%, at least 95%, at least 96%, at least 97%, at least 98%, or at least 99% identical to a ribonucleic acid sequence according to SEQ ID NO: 625. In some embodiments, a polyribonucleotide as provided herein comprises or consists of a ribonucleic acid sequence according to SEQ ID NO: 625.

[0112] In some embodiments, a polyribonucleotide as provided herein encodes an immunoglobulin chain that comprises an amino acid sequence having at least 85%, at least 90%, at least 95%, at least 96%, at least 97%, at least 98%, or at least 99% identity to an amino acid sequence according to SEQ ID NO: 635. In some embodiments, a polyribonucleotide as provided herein encodes an immunoglobulin chain that comprises or consists of an amino acid sequence according to SEQ ID NO: 635.

[0113] In some embodiments, a polyribonucleotide as provided herein comprises a ribonucleic acid sequence that is at least 85%, at least 90%, at least 95%, at least 96%, at least 97%, at least 98%, or at least 99% identical to a ribonucleic acid sequence according to SEQ ID NO: 634. In some embodiments, a polyribonucleotide as provided herein comprises or consists of a ribonucleic acid sequence according to SEQ ID NO: 634.

[0114] In some embodiments, a polyribonucleotide as provided herein encodes an immunoglobulin chain that comprises an amino acid sequence having at least 85%, at least 90%, at least 95%, at least 96%, at least 97%, at least 98%, or at least 99% identity to an amino acid sequence according to SEQ ID NO: 641. In some embodiments, a polyribonucleotide as provided herein encodes an immunoglobulin chain that comprises or consists of an amino acid sequence according to SEQ ID NO: 641.

[0115] In some embodiments, a polyribonucleotide comprises a ribonucleic acid sequence that is at least 85%, at least 90%, at least 95%, at least 96%, at least 97%, at least 98%, or at least 99% identical to a ribonucleic acid sequence according to SEQ ID NO: 640. In some embodiments, a polyribonucleotide as provided herein comprises or consists of a ribonucleic acid sequence according to SEQ ID NO: 640.

[0116] In some embodiments, a polyribonucleotide as provided herein encodes an immunoglobulin chain that comprises an amino acid sequence having at least 85%, at least 90%, at least 95%, at least 96%, at least 97%, at least 98%, or at least 99% identity to an amino acid sequence according to SEQ ID NO: 644. In some embodiments, a polyribonucleotide as provided herein encodes an immunoglobulin chain that comprises or consists of an amino acid sequence according to SEQ ID NO: 644.

[0117] In some embodiments, a polyribonucleotide as provided herein comprises a ribonucleic acid sequence that is at least 85%, at least 90%, at least 95%, at least 96%, at least 97%, at least 98%, or at least 99% identical to a ribonucleic acid sequence according to SEQ ID NO: 643. In some embodiments, a polyribonucleotide as provided herein comprises or consists of a ribonucleic acid sequence according to SEQ ID NO: 643.

[0118] In some embodiments, a polyribonucleotide as provided herein encodes an immunoglobulin chain that comprises an amino acid sequence having at least 85%, at least 90%, at least 95%, at least 96%, at least 97%, at least 98%, or at least 99% identity to an amino acid sequence according to SEQ ID NO: 647. In some embodiments, a polyribonucleotide as provided herein encodes an immunoglobulin chain that comprises or consists of an amino acid sequence according to SEQ ID NO: 647.

[0119] In some embodiments, a polyribonucleotide as provided herein comprises a ribonucleic acid sequence that is at least 85%, at least 90%, at least 95%, at least 96%, at least 97%, at least 98%, or at least 99% identical to a ribonucleic acid sequence according to SEQ ID NO: 646. In some embodiments, a polyribonucleotide as provided herein comprises or consists of a ribonucleic acid sequence according to SEQ ID NO: 646.

[0120] In some embodiments, a polyribonucleotide as provided herein encodes an immunoglobulin chain that comprises an amino acid sequence having at least 85%, at least 90%, at least 95%, at least 96%, at least 97%, at least 98%, or at least 99% identity to an amino acid sequence according to SEQ ID NO: 650. In some embodiments, a polyribonucleotide as provided herein encodes an immunoglobulin chain that comprises or consists of an amino acid sequence according to SEQ ID NO: 650.

[0121] In some embodiments, a polyribonucleotide as provided herein comprises a ribonucleic acid sequence that is at least 85%, at least 90%, at least 95%, at least 96%, at least 97%, at least 98%, or at least 99% identical to a ribonucleic acid sequence according to SEQ ID NO: 649. In some embodiments, a polyribonucleotide as provided herein comprises or consists of a ribonucleic acid sequence according to SEQ ID NO: 649.

[0122] In some embodiments, a polyribonucleotide as provided herein encodes an immunoglobulin chain that comprises an amino acid sequence having at least 85%, at least 90%, at least 95%, at least 96%, at least 97%, at least 98%, or at least 99% identity to an amino acid sequence according to SEQ ID NO: 653. In some embodiments, a polyribonucleotide as provided herein encodes an immunoglobulin chain that comprises or consists of an amino acid sequence according to SEQ ID NO: 653.

[0123] In some embodiments, a polyribonucleotide as provided herein comprises a ribonucleic acid sequence that is at least 85%, at least 90%, at least 95%, at least 96%, at least 97%, at least 98%, or at least 99% identical to a ribonucleic acid sequence according to SEQ ID NO: 652. In some embodiments, a polyribonucleotide as provided herein comprises or consists of a ribonucleic acid sequence according to SEQ ID NO: 652.

[0124] In some embodiments, a polyribonucleotide as provided herein encodes an immunoglobulin chain that comprises an amino acid sequence having at least 85%, at least 90%, at least 95%, at least 96%, at least 97%, at least 98%, or at least 99% identity to an amino acid sequence according to SEQ ID NO: 629. In some embodiments, a polyribonucleotide as provided herein encodes an immunoglobulin chain that comprises or consists of an amino acid sequence according to SEQ ID NO: 629.

[0125] In some embodiments, a polyribonucleotide as provided herein comprises a ribonucleic acid sequence that is at least 85%, at least 90%, at least 95%, at least 96%, at least 97%, at least 98%, or at least 99% identical to a ribonucleic acid sequence according to SEQ ID NO: 628. In some embodiments, a polyribonucleotide as provided herein comprises or consists of a ribonucleic acid sequence according to SEQ ID NO: 628.

[0126] In some embodiments, a polyribonucleotide as provided herein encodes an immunoglobulin chain that comprises an amino acid sequence having at least 85%, at least 90%, at least 95%, at least 96%, at least 97%, at least 98%, or at least 99% identity to an amino acid sequence according to SEQ ID NO: 620. In some embodiments, a polyribonucleotide as provided herein encodes an immunoglobulin chain that comprises or consists of an amino acid sequence according to SEQ ID NO: 620.

[0127] In some embodiments, a polyribonucleotide as provided herein comprises a ribonucleic acid sequence that is at least 85%, at least 90%, at least 95%, at least 96%, at least 97%, at least 98%, or at least 99% identical to a ribonucleic acid sequence according to SEQ ID NO: 619. In some embodiments, a polyribonucleotide as provided herein comprises or consists of a ribonucleic acid sequence according to SEQ ID NO: 619.

[0128] In some embodiments, a polyribonucleotide as provided herein encodes an immunoglobulin chain that comprises an amino acid sequence having at least 85%, at least 90%, at least 95%, at least 96%, at least 97%, at least 98%, or at least 99% identity to an amino acid sequence according to SEQ ID NO: 638. In some embodiments, a polyribonucleotide as provided herein encodes an immunoglobulin chain that comprises or consists of an amino acid sequence according to SEQ ID NO: 638.

[0129] In some embodiments, a polyribonucleotide as provided herein comprises a ribonucleic acid sequence that is at least 85%, at least 90%, at least 95%, at least 96%, at least 97%, at least 98%, or at least 99% identical to a ribonucleic acid sequence according to SEQ ID NO: 637. In some embodiments, a polyribonucleotide as provided herein comprises or consists of a ribonucleic acid sequence according to SEQ ID NO: 637.

[0130] In some embodiments, a polyribonucleotide as provided herein encodes an immunoglobulin chain that comprises an amino acid sequence having at least 85%, at least 90%, at least 95%, at least 96%, at least 97%, at least 98%, or at least 99% identity to an amino acid sequence according to SEQ ID NO: 668. In some embodiments, a polyribonucleotide as provided herein encodes an immunoglobulin chain that comprises or consists of an amino acid sequence according to SEQ ID NO: 668.

[0131] In some embodiments, a polyribonucleotide as provided herein comprises a ribonucleic acid sequence that is at least 85%, at least 90%, at least 95%, at least 96%, at least 97%, at least 98%, or at least 99% identical to a ribonucleic acid sequence according to SEQ ID NO: 667. In some embodiments, a polyribonucleotide as provided herein polyribonucleotide comprises or consists of a ribonucleic acid sequence according to SEQ ID NO: 667.

[0132] In some embodiments, a polyribonucleotide as provided herein encodes an immunoglobulin chain that comprises an amino acid sequence having at least 85%, at least 90%, at least 95%, at least 96%, at least 97%, at least 98%, or at least 99% identity to an amino acid sequence according to SEQ ID NO: 632. In some embodiments, a polyribonucleotide as provided herein encodes an immunoglobulin chain that comprises or consists of an amino acid sequence according to SEQ ID NO: 632.

[0133] In some embodiments, a polyribonucleotide as provided herein comprises a ribonucleic acid sequence that is at least 85%, at least 90%, at least 95%, at least 96%, at least 97%, at least 98%, or at least 99% identical to a ribonucleic acid sequence according to SEQ ID NO: 631. In some embodiments, a polyribonucleotide as provided herein comprises or consists of a ribonucleic acid sequence according to SEQ ID NO: 631.

[0134] In some embodiments, a polyribonucleotide as provided herein encodes an immunoglobulin chain that comprises an amino acid sequence having at least 85%, at least 90%, at least 95%, at least 96%, at least 97%, at least 98%, or at least 99% identity to an amino acid sequence according to SEQ ID NO: 656. In some embodiments, a polyribonucleotide as provided herein encodes an immunoglobulin chain that comprises or consists of a sequence according to SEQ ID NO: 656.

[0135] In some embodiments, a polyribonucleotide as provided herein comprises a ribonucleic acid sequence that is at least 85%, at least 90%, at least 95%, at least 96%, at least 97%, at least 98%, or at least 99% identical to a ribonucleic acid sequence according to SEQ ID NO: 655. In some embodiments, a polyribonucleotide as provided herein comprises or consists of a ribonucleic acid sequence according to SEQ ID NO: 655.

[0136] In some embodiments, a polyribonucleotide as provided herein encodes an immunoglobulin chain that comprises an amino acid sequence having at least 85%, at least 90%, at least 95%, at least 96%, at least 97%, at least 98%, or at least 99% identity to an amino acid sequence according to SEQ ID NO: 659. In some embodiments, a polyribonucleotide as provided herein encodes an immunoglobulin chain that comprises or consists of a sequence according to SEQ ID NO: 659.

[0137] In some embodiments, a polyribonucleotide as provided herein comprises a ribonucleic acid sequence that is at least 85%, at least 90%, at least 95%, at least 96%, at least 97%, at least 98%, or at least 99% identical to a ribonucleic acid sequence according to SEQ ID NO: 658. In some embodiments, a polyribonucleotide as provided herein comprises or consists of a ribonucleic acid sequence according to SEQ ID NO: 658.

[0138] In some embodiments, a polyribonucleotide as provided herein encodes an immunoglobulin chain that comprises an amino acid sequence having at least 85%, at least 90%, at least 95%, at least 96%, at least 97%, at least 98%, or at least 99% identity to an amino acid sequence according to SEQ ID NO: 662. In some embodiments, a polyribonucleotide as provided herein encodes an immunoglobulin chain that comprises or consists of a sequence according to SEQ ID NO: 662.

[0139] In some embodiments, a polyribonucleotide as provided herein comprises a ribonucleic acid sequence that is at least 85%, at least 90%, at least 95%, at least 96%, at least 97%, at least 98%, or at least 99% identical to a ribonucleic acid sequence according to SEQ ID NO: 661. In some embodiments, a polyribonucleotide as provided herein comprises or consists of a ribonucleic acid sequence according to SEQ ID NO: 661.

[0140] In some embodiments, a polyribonucleotide as provided herein encodes an immunoglobulin chain that comprises an amino acid sequence having at least 85%, at least 90%, at least 95%, at least 96%, at least 97%, at least 98%, or at least 99% identity to an amino acid sequence according to SEQ ID NO: 665. In some embodiments, a polyribonucleotide as provided herein encodes an immunoglobulin chain that comprises or consists of a sequence according to SEQ ID NO: 665.

[0141] In some embodiments, a polyribonucleotide as provided herein comprises a ribonucleic acid sequence that is at least 85%, at least 90%, at least 95%, at least 96%, at least 97%, at least 98%, or at least 99% identical to a ribonucleic acid sequence according to SEQ ID NO: 664. In some embodiments, a polyribonucleotide as provided herein comprises or consists of a ribonucleic acid sequence according to SEQ ID NO: 664.

[0142] In some embodiments, a polyribonucleotide comprises a ribonucleic acid sequence encoding a secretion signal.

[0143] In some embodiments, a secretion signal comprises a ribonucleic acid sequence according to SEQ ID NO: 2 or SEQ ID NO: 4.

[0144] In some embodiments, a polyribonucleotide comprises one or more non-coding sequence elements.

[0145] In some embodiments, one or more non-coding sequence elements enhances RNA stability and/or translation efficiency.

[0146] In some embodiments, one or more non-coding sequence elements comprise a 3′ untranslated region (UTR), a 5′ UTR, a 5′-cap, a polyadenine (polyA) tail, or combination thereof.

[0147] In some embodiments, a polyA tail is or comprises a modified polyA sequence, preferably an interrupted polyA tail.

[0148] In some embodiments, a polyA tail comprises or consists of a sequence that is at least 90%, at least 95%, or at least 99% identical to SEQ ID NO: 474.

[0149] In some embodiments, a 3′ UTR comprises or consists of a nucleic acid sequence that is at least 90%, at least 95%, or at least 99% identical to SEQ ID NO: 473.

[0150] In some embodiments, a 5′ UTR comprises or consists of a nucleic acid sequence that is at least 90%, at least 95%, or at least 99% identical to SEQ ID NO: 472.

[0151] In some embodiments, a 5′-cap is (m27,3′-O)Gppp(m2′-O)ApG.

[0152] In some embodiments, a polyribonucleotide comprises one or more modified ribonucleotides. In some embodiments, one or more modified ribonucleotides comprise pseudouridine.

[0153] In some embodiments, a polyribonucleotide comprises a ribonucleic acid sequence that is at least 85%, at least 90%, at least 95%, at least 96%, at least 97%, at least 98%, or at least 99% identical to a ribonucleic acid sequence according to SEQ ID NO: 454. In some embodiments, a polyribonucleotide comprises or consists of a ribonucleic acid sequence according to SEQ ID NO: 454.

[0154] In some embodiments, a polyribonucleotide comprises a ribonucleic acid sequence that is at least 85%, at least 90%, at least 95%, at least 96%, at least 97%, at least 98%, or at least 99% identical to a ribonucleic acid sequence according to SEQ ID NO: 455. In some embodiments, a polyribonucleotide comprises or consists of a ribonucleic acid sequence according to SEQ ID NO: 455.

[0155] In some embodiments, a polyribonucleotide comprises a ribonucleic acid sequence that is at least 85%, at least 90%, at least 95%, at least 96%, at least 97%, at least 98%, or at least 99% identical to a ribonucleic acid sequence according to SEQ ID NO: 457. In some embodiments, a polyribonucleotide comprises or consists of a ribonucleic acid sequence according to SEQ ID NO: 457.

[0156] In some embodiments, a polyribonucleotide comprises a ribonucleic acid sequence that is at least 85%, at least 90%, at least 95%, at least 96%, at least 97%, at least 98%, or at least 99% identical to a ribonucleic acid sequence according to SEQ ID NO: 456. In some embodiments, a polyribonucleotide comprises or consists of a ribonucleic acid sequence according to SEQ ID NO: 456.

[0157] In some embodiments, a polyribonucleotide comprises a ribonucleic acid sequence that is at least 85%, at least 90%, at least 95%, at least 96%, at least 97%, at least 98%, or at least 99% identical to a ribonucleic acid sequence according to SEQ ID NO: 461. In some embodiments, a polyribonucleotide comprises or consists of a ribonucleic acid sequence according to SEQ ID NO: 461.

[0158] In some embodiments, a polyribonucleotide comprises a ribonucleic acid sequence that is at least 85%, at least 90%, at least 95%, at least 96%, at least 97%, at least 98%, or at least 99% identical to a ribonucleic acid sequence according to SEQ ID NO: 463. In some embodiments, a polyribonucleotide comprises or consists of a ribonucleic acid sequence according to SEQ ID NO: 463.

[0159] In some embodiments, a polyribonucleotide comprises a ribonucleic acid sequence that is at least 85%, at least 90%, at least 95%, at least 96%, at least 97%, at least 98%, or at least 99% identical to a ribonucleic acid sequence according to SEQ ID NO: 465. In some embodiments, a polyribonucleotide comprises or consists of a ribonucleic acid sequence according to SEQ ID NO: 465.

[0160] In some embodiments, a polyribonucleotide comprises a ribonucleic acid sequence that is at least 85%, at least 90%, at least 95%, at least 96%, at least 97%, at least 98%, or at least 99% identical to a ribonucleic acid sequence according to SEQ ID NO: 462. In some embodiments, a polyribonucleotide comprises or consists of a ribonucleic acid sequence according to SEQ ID NO: 462.

[0161] In some embodiments, a polyribonucleotide comprises a ribonucleic acid sequence that is at least 85%, at least 90%, at least 95%, at least 96%, at least 97%, at least 98%, or at least 99% identical to a ribonucleic acid sequence according to SEQ ID NO: 464. In some embodiments, a polyribonucleotide comprises or consists of a ribonucleic acid sequence according to SEQ ID NO: 464.

[0162] In some embodiments, a polyribonucleotide comprises a ribonucleic acid sequence that is at least 85%, at least 90%, at least 95%, at least 96%, at least 97%, at least 98%, or at least 99% identical to a ribonucleic acid sequence according to SEQ ID NO: 466. In some embodiments, a polyribonucleotide comprises or consists of a ribonucleic acid sequence according to SEQ ID NO: 466.

[0163] In some embodiments, a polyribonucleotide comprises a ribonucleic acid sequence that is at least 85%, at least 90%, at least 95%, at least 96%, at least 97%, at least 98%, or at least 99% identical to a ribonucleic acid sequence according to SEQ ID NO: 459. In some embodiments, a polyribonucleotide comprises or consists of a ribonucleic acid sequence according to SEQ ID NO: 459.

[0164] In some embodiments, a polyribonucleotide comprises a ribonucleic acid sequence that is at least 85%, at least 90%, at least 95%, at least 96%, at least 97%, at least 98%, or at least 99% identical to a ribonucleic acid sequence according to SEQ ID NO: 458. In some embodiments, a polyribonucleotide comprises or consists of a ribonucleic acid sequence according to SEQ ID NO: 458.

[0165] In some embodiments, a polyribonucleotide comprises a ribonucleic acid sequence that is at least 85%, at least 90%, at least 95%, at least 96%, at least 97%, at least 98%, or at least 99% identical to a ribonucleic acid sequence according to SEQ ID NO: 467. In some embodiments, a polyribonucleotide comprises or consists of a ribonucleic acid sequence according to SEQ ID NO: 467.

[0166] In some embodiments, a polyribonucleotide comprises a ribonucleic acid sequence that is at least 85%, at least 90%, at least 95%, at least 96%, at least 97%, at least 98%, or at least 99% identical to a ribonucleic acid sequence according to SEQ ID NO: 460. In some embodiments, a polyribonucleotide comprises or consists of a ribonucleic acid sequence according to SEQ ID NO: 460.

[0167] In some embodiments, a polyribonucleotide comprises a ribonucleic acid sequence that is at least 85%, at least 90%, at least 95%, at least 96%, at least 97%, at least 98%, or at least 99% identical to a ribonucleic acid sequence according to SEQ ID NO: 468. In some embodiments, a polyribonucleotide comprises or consists of a ribonucleic acid sequence according to SEQ ID NO: 468.

[0168] In some embodiments, a polyribonucleotide comprises a ribonucleic acid sequence that is at least 85%, at least 90%, at least 95%, at least 96%, at least 97%, at least 98%, or at least 99% identical to a ribonucleic acid sequence according to SEQ ID NO: 470. In some embodiments, a polyribonucleotide comprises or consists of a ribonucleic acid sequence according to SEQ ID NO: 470.

[0169] In some embodiments, a polyribonucleotide comprises a ribonucleic acid sequence that is at least 85%, at least 90%, at least 95%, at least 96%, at least 97%, at least 98%, or at least 99% identical to a ribonucleic acid sequence according to SEQ ID NO: 469. In some embodiments, a polyribonucleotide comprises or consists of a ribonucleic acid sequence according to SEQ ID NO: 469.

[0170] In some embodiments, a polyribonucleotide comprises a ribonucleic acid sequence that is at least 85%, at least 90%, at least 95%, at least 96%, at least 97%, at least 98%, or at least 99% identical to a ribonucleic acid sequence according to SEQ ID NO: 471. In some embodiments, a polyribonucleotide comprises or consists of a ribonucleic acid sequence according to SEQ ID NO: 471.

[0171] In some embodiments, a polyribonucleotide comprises a ribonucleic acid sequence that is at least 85%, at least 90%, at least 95%, at least 96%, at least 97%, at least 98%, or at least 99% identical to a ribonucleic acid sequence according to any one of SEQ ID NOs: 669-864. In some embodiments, a polyribonucleotide comprises or consists of a ribonucleic acid sequence according to any one of SEQ ID NO: 669-864.

[0172] In some embodiments, a polyribonucleotide is a non-natural polyribonucleotide.

[0173] In some embodiments, a polyribonucleotide is an engineered polyribonucleotide.

[0174] In some embodiments, a polyribonucleotide is an isolated polyribonucleotide.

[0175] Among other things, the present disclosure provides composition comprising one or more polyribonucleotides as described herein.

[0176] In some embodiments, a composition comprises or consists of a polyribonucleotide encoding an immunoglobulin chain that comprises an amino acid sequence having at least 85%, at least 90%, at least 95%, at least 96%, at least 97%, at least 98%, or at least 99% identity to an amino acid sequence according to SEQ ID NO: 614 and a polyribonucleotide encoding an immunoglobulin chain that comprises an amino acid sequence having at least 85%, at least 90%, at least 95%, at least 96%, at least 97%, at least 98%, or at least 99% identity to an amino acid sequence according to SEQ ID NO: 620.

[0177] In some embodiments, a composition comprises or consists of a polyribonucleotide comprises a ribonucleic acid sequence that is at least 85%, at least 90%, at least 95%, at least 96%, at least 97%, at least 98%, or at least 99% identical to a ribonucleic acid sequence according to any one of SEQ ID NO: 613 and a polyribonucleotide comprises a ribonucleic acid sequence that is at least 85%, at least 90%, at least 95%, at least 96%, at least 97%, at least 98%, or at least 99% identical to a ribonucleic acid sequence according to any one of SEQ ID NO: 619.

[0178] In some embodiments, a composition comprises or consists of a polyribonucleotide encoding an immunoglobulin chain that comprises an amino acid sequence having at least 85%, at least 90%, at least 95%, at least 96%, at least 97%, at least 98%, or at least 99% identity to an amino acid sequence according to SEQ ID NO: 617 and a polyribonucleotide encoding an immunoglobulin chain that comprises an amino acid sequence having at least 85%, at least 90%, at least 95%, at least 96%, at least 97%, at least 98%, or at least 99% identity to an amino acid sequence according to SEQ ID NO: 620.

[0179] In some embodiments, a composition comprises or consists of a polyribonucleotide comprises a ribonucleic acid sequence that is at least 85%, at least 90%, at least 95%, at least 96%, at least 97%, at least 98%, or at least 99% identical to a ribonucleic acid sequence according to any one of SEQ ID NO: 616 and a polyribonucleotide comprises a ribonucleic acid sequence that is at least 85%, at least 90%, at least 95%, at least 96%, at least 97%, at least 98%, or at least 99% identical to a ribonucleic acid sequence according to any one of SEQ ID NO: 619.

[0180] In some embodiments, a composition comprises or consists of a polyribonucleotide encoding an immunoglobulin chain that comprises an amino acid sequence having at least 85%, at least 90%, at least 95%, at least 96%, at least 97%, at least 98%, or at least 99% identity to an amino acid sequence according to SEQ ID NO: 623 and a polyribonucleotide encoding an immunoglobulin chain that comprises an amino acid sequence having at least 85%, at least 90%, at least 95%, at least 96%, at least 97%, at least 98%, or at least 99% identity to an amino acid sequence according to SEQ ID NO: 620.

[0181] In some embodiments, a composition comprises or consists of a polyribonucleotide comprises a ribonucleic acid sequence that is at least 85%, at least 90%, at least 95%, at least 96%, at least 97%, at least 98%, or at least 99% identical to a ribonucleic acid sequence according to any one of SEQ ID NO: 622 and a polyribonucleotide comprises a ribonucleic acid sequence that is at least 85%, at least 90%, at least 95%, at least 96%, at least 97%, at least 98%, or at least 99% identical to a ribonucleic acid sequence according to any one of SEQ ID NO: 619.

[0182] In some embodiments, a composition comprises or consists of a polyribonucleotide encoding an immunoglobulin chain that comprises an amino acid sequence having at least 85%, at least 90%, at least 95%, at least 96%, at least 97%, at least 98%, or at least 99% identity to an amino acid sequence according to SEQ ID NO: 626 and a polyribonucleotide encoding an immunoglobulin chain that comprises an amino acid sequence having at least 85%, at least 90%, at least 95%, at least 96%, at least 97%, at least 98%, or at least 99% identity to an amino acid sequence according to SEQ ID NO: 620.

[0183] In some embodiments, a composition comprises or consists of a polyribonucleotide comprises a ribonucleic acid sequence that is at least 85%, at least 90%, at least 95%, at least 96%, at least 97%, at least 98%, or at least 99% identical to a ribonucleic acid sequence according to any one of SEQ ID NO: 625 and a polyribonucleotide comprises a ribonucleic acid sequence that is at least 85%, at least 90%, at least 95%, at least 96%, at least 97%, at least 98%, or at least 99% identical to a ribonucleic acid sequence according to any one of SEQ ID NO: 619.

[0184] In some embodiments, a composition comprises or consists of a polyribonucleotide encoding an immunoglobulin chain that comprises an amino acid sequence having at least 85%, at least 90%, at least 95%, at least 96%, at least 97%, at least 98%, or at least 99% identity to an amino acid sequence according to SEQ ID NO: 635 and a polyribonucleotide encoding an immunoglobulin chain that comprises an amino acid sequence having at least 85%, at least 90%, at least 95%, at least 96%, at least 97%, at least 98%, or at least 99% identity to an amino acid sequence according to SEQ ID NO: 638.

[0185] In some embodiments, a composition comprises or consists of a polyribonucleotide comprises a ribonucleic acid sequence that is at least 85%, at least 90%, at least 95%, at least 96%, at least 97%, at least 98%, or at least 99% identical to a ribonucleic acid sequence according to any one of SEQ ID NO: 634 and a polyribonucleotide comprises a ribonucleic acid sequence that is at least 85%, at least 90%, at least 95%, at least 96%, at least 97%, at least 98%, or at least 99% identical to a ribonucleic acid sequence according to any one of SEQ ID NO: 637.

[0186] In some embodiments, a composition comprises or consists of a polyribonucleotide encoding an immunoglobulin chain that comprises an amino acid sequence having at least 85%, at least 90%, at least 95%, at least 96%, at least 97%, at least 98%, or at least 99% identity to an amino acid sequence according to SEQ ID NO: 641 and a polyribonucleotide encoding an immunoglobulin chain that comprises an amino acid sequence having at least 85%, at least 90%, at least 95%, at least 96%, at least 97%, at least 98%, or at least 99% identity to an amino acid sequence according to SEQ ID NO: 638

[0187] In some embodiments, a composition comprises or consists of a polyribonucleotide comprises a ribonucleic acid sequence that is at least 85%, at least 90%, at least 95%, at least 96%, at least 97%, at least 98%, or at least 99% identical to a ribonucleic acid sequence according to any one of SEQ ID NO: 640 and a polyribonucleotide comprises a ribonucleic acid sequence that is at least 85%, at least 90%, at least 95%, at least 96%, at least 97%, at least 98%, or at least 99% identical to a ribonucleic acid sequence according to any one of SEQ ID NO: 637.

[0188] In some embodiments, a composition comprises or consists of a polyribonucleotide encoding an immunoglobulin chain that comprises an amino acid sequence having at least 85%, at least 90%, at least 95%, at least 96%, at least 97%, at least 98%, or at least 99% identity to an amino acid sequence according to SEQ ID NO: 644 and a polyribonucleotide encoding an immunoglobulin chain that comprises an amino acid sequence having at least 85%, at least 90%, at least 95%, at least 96%, at least 97%, at least 98%, or at least 99% identity to an amino acid sequence according to SEQ ID NO: 638.

[0189] In some embodiments, a composition comprises or consists of a polyribonucleotide comprises a ribonucleic acid sequence that is at least 85%, at least 90%, at least 95%, at least 96%, at least 97%, at least 98%, or at least 99% identical to a ribonucleic acid sequence according to any one of SEQ ID NO: 643 and a polyribonucleotide comprises a ribonucleic acid sequence that is at least 85%, at least 90%, at least 95%, at least 96%, at least 97%, at least 98%, or at least 99% identical to a ribonucleic acid sequence according to any one of SEQ ID NO: 637.

[0190] In some embodiments, a composition comprises or consists of a polyribonucleotide encoding an immunoglobulin chain that comprises an amino acid sequence having at least 85%, at least 90%, at least 95%, at least 96%, at least 97%, at least 98%, or at least 99% identity to an amino acid sequence according to SEQ ID NO: 647 and a polyribonucleotide encoding an immunoglobulin chain that comprises an amino acid sequence having at least 85%, at least 90%, at least 95%, at least 96%, at least 97%, at least 98%, or at least 99% identity to an amino acid sequence according to SEQ ID NO: 638.

[0191] In some embodiments, a composition comprises or consists of a polyribonucleotide comprises a ribonucleic acid sequence that is at least 85%, at least 90%, at least 95%, at least 96%, at least 97%, at least 98%, or at least 99% identical to a ribonucleic acid sequence according to any one of SEQ ID NO: 646 and a polyribonucleotide comprises a ribonucleic acid sequence that is at least 85%, at least 90%, at least 95%, at least 96%, at least 97%, at least 98%, or at least 99% identical to a ribonucleic acid sequence according to any one of SEQ ID NO: 637.

[0192] In some embodiments, a composition comprises or consists of a polyribonucleotide encoding an immunoglobulin chain that comprises an amino acid sequence having at least 85%, at least 90%, at least 95%, at least 96%, at least 97%, at least 98%, or at least 99% identity to an amino acid sequence according to SEQ ID NO: 650 and a polyribonucleotide encoding an immunoglobulin chain that comprises an amino acid sequence having at least 85%, at least 90%, at least 95%, at least 96%, at least 97%, at least 98%, or at least 99% identity to an amino acid sequence according to SEQ ID NO: 638.

[0193] In some embodiments, a composition comprises or consists of a polyribonucleotide comprises a ribonucleic acid sequence that is at least 85%, at least 90%, at least 95%, at least 96%, at least 97%, at least 98%, or at least 99% identical to a ribonucleic acid sequence according to any one of SEQ ID NO: 649 and a polyribonucleotide comprises a ribonucleic acid sequence that is at least 85%, at least 90%, at least 95%, at least 96%, at least 97%, at least 98%, or at least 99% identical to a ribonucleic acid sequence according to any one of SEQ ID NO: 637.

[0194] In some embodiments, a composition comprises or consists of a polyribonucleotide encoding an immunoglobulin chain that comprises an amino acid sequence having at least 85%, at least 90%, at least 95%, at least 96%, at least 97%, at least 98%, or at least 99% identity to an amino acid sequence according to SEQ ID NO: 653 and a polyribonucleotide encoding an immunoglobulin chain that comprises an amino acid sequence having at least 85%, at least 90%, at least 95%, at least 96%, at least 97%, at least 98%, or at least 99% identity to an amino acid sequence according to SEQ ID NO: 638.

[0195] In some embodiments, a composition comprises or consists of a polyribonucleotide comprises a ribonucleic acid sequence that is at least 85%, at least 90%, at least 95%, at least 96%, at least 97%, at least 98%, or at least 99% identical to a ribonucleic acid sequence according to any one of SEQ ID NO: 652] and a polyribonucleotide comprises a ribonucleic acid sequence that is at least 85%, at least 90%, at least 95%, at least 96%, at least 97%, at least 98%, or at least 99% identical to a ribonucleic acid sequence according to any one of SEQ ID NO: 637.

[0196] In some embodiments, a composition comprises or consists of a polyribonucleotide encoding an immunoglobulin chain that comprises an amino acid sequence having at least 85%, at least 90%, at least 95%, at least 96%, at least 97%, at least 98%, or at least 99% identity to an amino acid sequence according to SEQ ID NO: 635 and a polyribonucleotide encoding an immunoglobulin chain that comprises an amino acid sequence having at least 85%, at least 90%, at least 95%, at least 96%, at least 97%, at least 98%, or at least 99% identity to an amino acid sequence according to SEQ ID NO: 668.

[0197] In some embodiments, a composition comprises or consists of a polyribonucleotide comprises a ribonucleic acid sequence that is at least 85%, at least 90%, at least 95%, at least 96%, at least 97%, at least 98%, or at least 99% identical to a ribonucleic acid sequence according to any one of SEQ ID NO: 634 and a polyribonucleotide comprises a ribonucleic acid sequence that is at least 85%, at least 90%, at least 95%, at least 96%, at least 97%, at least 98%, or at least 99% identical to a ribonucleic acid sequence according to any one of SEQ ID NO: 667.

[0198] In some embodiments, a composition comprises or consists of a polyribonucleotide encoding an immunoglobulin chain that comprises an amino acid sequence having at least 85%, at least 90%, at least 95%, at least 96%, at least 97%, at least 98%, or at least 99% identity to an amino acid sequence according to SEQ ID NO: 641 and a polyribonucleotide encoding an immunoglobulin chain that comprises an amino acid sequence having at least 85%, at least 90%, at least 95%, at least 96%, at least 97%, at least 98%, or at least 99% identity to an amino acid sequence according to SEQ ID NO: 668.

[0199] In some embodiments, a composition comprises or consists of a polyribonucleotide comprises a ribonucleic acid sequence that is at least 85%, at least 90%, at least 95%, at least 96%, at least 97%, at least 98%, or at least 99% identical to a ribonucleic acid sequence according to any one of SEQ ID NO: 640 and a polyribonucleotide comprises a ribonucleic acid sequence that is at least 85%, at least 90%, at least 95%, at least 96%, at least 97%, at least 98%, or at least 99% identical to a ribonucleic acid sequence according to any one of SEQ ID NO: 667.

[0200] In some embodiments, a composition comprises or consists of a polyribonucleotide encoding an immunoglobulin chain that comprises an amino acid sequence having at least 85%, at least 90%, at least 95%, at least 96%, at least 97%, at least 98%, or at least 99% identity to an amino acid sequence according to SEQ ID NO: 644 and a polyribonucleotide encoding an immunoglobulin chain that comprises an amino acid sequence having at least 85%, at least 90%, at least 95%, at least 96%, at least 97%, at least 98%, or at least 99% identity to an amino acid sequence according to SEQ ID NO: 668.

[0201] In some embodiments, a composition comprises or consists of a polyribonucleotide comprises a ribonucleic acid sequence that is at least 85%, at least 90%, at least 95%, at least 96%, at least 97%, at least 98%, or at least 99% identical to a ribonucleic acid sequence according to any one of SEQ ID NO: 643 and a polyribonucleotide comprises a ribonucleic acid sequence that is at least 85%, at least 90%, at least 95%, at least 96%, at least 97%, at least 98%, or at least 99% identical to a ribonucleic acid sequence according to any one of SEQ ID NO: 667.

[0202] In some embodiments, a composition comprises or consists of a polyribonucleotide encoding an immunoglobulin chain that comprises an amino acid sequence having at least 85%, at least 90%, at least 95%, at least 96%, at least 97%, at least 98%, or at least 99% identity to an amino acid sequence according to SEQ ID NO: 647 and a polyribonucleotide encoding an immunoglobulin chain that comprises an amino acid sequence having at least 85%, at least 90%, at least 95%, at least 96%, at least 97%, at least 98%, or at least 99% identity to an amino acid sequence according to SEQ ID NO: 668.

[0203] In some embodiments, a composition comprises or consists of a polyribonucleotide comprises a ribonucleic acid sequence that is at least 85%, at least 90%, at least 95%, at least 96%, at least 97%, at least 98%, or at least 99% identical to a ribonucleic acid sequence according to any one of SEQ ID NO: 646 and a polyribonucleotide comprises a ribonucleic acid sequence that is at least 85%, at least 90%, at least 95%, at least 96%, at least 97%, at least 98%, or at least 99% identical to a ribonucleic acid sequence according to any one of SEQ ID NO: 667.

[0204] In some embodiments, a composition comprises or consists of a polyribonucleotide encoding an immunoglobulin chain that comprises an amino acid sequence having at least 85%, at least 90%, at least 95%, at least 96%, at least 97%, at least 98%, or at least 99% identity to an amino acid sequence according to SEQ ID NO: 650 and a polyribonucleotide encoding an immunoglobulin chain that comprises an amino acid sequence having at least 85%, at least 90%, at least 95%, at least 96%, at least 97%, at least 98%, or at least 99% identity to an amino acid sequence according to SEQ ID NO: 668.

[0205] In some embodiments, a composition comprises or consists of a polyribonucleotide comprises a ribonucleic acid sequence that is at least 85%, at least 90%, at least 95%, at least 96%, at least 97%, at least 98%, or at least 99% identical to a ribonucleic acid sequence according to any one of SEQ ID NO: 649 and a polyribonucleotide comprises a ribonucleic acid sequence that is at least 85%, at least 90%, at least 95%, at least 96%, at least 97%, at least 98%, or at least 99% identical to a ribonucleic acid sequence according to any one of SEQ ID NO: 667.

[0206] In some embodiments, a composition comprises or consists of a polyribonucleotide encoding an immunoglobulin chain that comprises an amino acid sequence having at least 85%, at least 90%, at least 95%, at least 96%, at least 97%, at least 98%, or at least 99% identity to an amino acid sequence according to SEQ ID NO: 653 and a polyribonucleotide encoding an immunoglobulin chain that comprises an amino acid sequence having at least 85%, at least 90%, at least 95%, at least 96%, at least 97%, at least 98%, or at least 99% identity to an amino acid sequence according to SEQ ID NO: 668.

[0207] In some embodiments, a composition comprises or consists of a polyribonucleotide comprises a ribonucleic acid sequence that is at least 85%, at least 90%, at least 95%, at least 96%, at least 97%, at least 98%, or at least 99% identical to a ribonucleic acid sequence according to any one of SEQ ID NO: 652 and a polyribonucleotide comprises a ribonucleic acid sequence that is at least 85%, at least 90%, at least 95%, at least 96%, at least 97%, at least 98%, or at least 99% identical to a ribonucleic acid sequence according to any one of SEQ ID NO: 667.

[0208] In some embodiments, a composition comprises or consists of a polyribonucleotide encoding an immunoglobulin chain that comprises an amino acid sequence having at least 85%, at least 90%, at least 95%, at least 96%, at least 97%, at least 98%, or at least 99% identity to an amino acid sequence according to SEQ ID NO: 629 and a polyribonucleotide encoding an immunoglobulin chain that comprises an amino acid sequence having at least 85%, at least 90%, at least 95%, at least 96%, at least 97%, at least 98%, or at least 99% identity to an amino acid sequence according to SEQ ID NO: 632.

[0209] In some embodiments, a composition comprises or consists of a polyribonucleotide comprises a ribonucleic acid sequence that is at least 85%, at least 90%, at least 95%, at least 96%, at least 97%, at least 98%, or at least 99% identical to a ribonucleic acid sequence according to any one of SEQ ID NO: 628 and a polyribonucleotide comprises a ribonucleic acid sequence that is at least 85%, at least 90%, at least 95%, at least 96%, at least 97%, at least 98%, or at least 99% identical to a ribonucleic acid sequence according to any one of SEQ ID NO: 631.

[0210] In some embodiments, a composition further comprises lipid nanoparticles, polyplexes (PLX), lipidated polyplexes (LPLX), or liposomes, where the one or more polyribonucleotides are fully or partially encapsulated within the lipid nanoparticles, polyplexes (PLX), lipidated polyplexes (LPLX), or liposomes.

[0211] In some embodiments, a composition further comprises lipid nanoparticles, where the one or more polyribonucleotides are encapsulated within the lipid nanoparticles.

[0212] In some embodiments, lipid nanoparticles target liver cells.

[0213] In some embodiments, lipid nanoparticles target secondary lymphoid organ cells.

[0214] In some embodiments, lipid nanoparticles target lung cells.

[0215] In some embodiments, lipid nanoparticles are cationic lipid nanoparticles.

[0216] In some embodiments, lipid nanoparticles each comprise a polymer-conjugated lipid, a cationic lipid, and one or more neutral lipids.

[0217] In some embodiments, a polymer-conjugated lipid comprises a PEG-conjugated lipid.

[0218] In some embodiments, a polymer-conjugated lipid comprises 2-[(polyethylene glycol)-2000]-N,N-ditetradecylacetamide.

[0219] In some embodiments, one or more neutral lipids comprise 1,2-Distearoyl-sn-glycero-3-phosphocholine (DPSC).

[0220] In some embodiments, one or more neutral lipids comprise cholesterol.

[0221] In some embodiments, a cationic lipid comprises ((3-hydroxypropyl)azanediyl)bis(nonane-9,1-diyl)bis(2-butyloctanoate).

[0222] In some embodiments, lipid nanoparticles each comprise 2-[(polyethylene glycol)-2000]-N,N-ditetradecylacetamide, DPSC, cholesterol, and ((3-hydroxypropyl)azanediyl)bis(nonane-9,1-diyl)bis(2-butyloctanoate).

[0223] In some embodiments, lipid nanoparticles comprise the polymer-conjugated lipid at about 1-2.5 mol % of the total lipids, the cationic lipid at 35-65 mol % of the total lipids, and the one or more neutral lipids are present in 35-65 mol % of the total lipids.

[0224] In some embodiments, lipid nanoparticles have an average diameter of about 50-150 nm.

[0225] The present disclosure also provides pharmaceutical compositions. In some embodiments, a pharmaceutical composition comprises a composition provided herein and at least one pharmaceutically acceptable excipient.

[0226] In some embodiments, a pharmaceutical comprises a cryoprotectant. In some embodiments, a pharmaceutical comprises an aqueous buffered solution.

[0227] Among other things, the present disclosure provides methods.

[0228] In some embodiments, a method comprises administering a pharmaceutical composition provided herein to a subject.

[0229] In some embodiments, a pharmaceutical composition provided herein is for use in the treatment of HIV comprising administering the pharmaceutical composition to a subject.

[0230] In some embodiments, a pharmaceutical composition provided herein is for use in the prevention of HIV comprising administering the pharmaceutical composition to a subject.

[0231] In some embodiments, a method or pharmaceutical composition for use provided herein, comprises administering the pharmaceutical composition to the subject, which results in expression in the subject of an immunoglobulin chain of antibody agent, an antibody agent, or both.

[0232] In some embodiments, an immunoglobulin chain of antibody agent, the antibody agent, or both is expressed in the subject at a titer of at least 1 μg/ml in plasma or serum.

[0233] In some embodiments, an antibody agent exhibits a geometric mean IC50 of five neutralized strains of less than 0.3 g/ml against the neutralized strains of a global reference panel when tested in the TZM-bl cell pseudovirus neutralization assay at antibody agent concentrations up to 25 g/ml.

[0234] In some embodiments, an antibody agent is capable of neutralizing one or more HIV strains when tested in the TZM-bl cell pseudovirus neutralization assay at antibody agent concentrations up to 25 g/ml.

[0235] In some embodiments, an antibody agent is capable of neutralizing one or more HIV strains at a level that is within 3-fold of a level of an equivalent amount of recombinant benchmark antibody.

[0236] In some embodiments, a recombinant benchmark antibody is an unmodified wild-type IgG antibody comprising the same HCDR1, HCDR2, HCDR2, LCDR1, LCDR2, and LCDR3 as the antibody agent.

[0237] In some embodiments, administering the pharmaceutical composition to the subject comprises administering one or more doses of the pharmaceutical composition to the subject. In some embodiments, one or more doses of the pharmaceutical composition are administered to the subject weekly. In some embodiments, one or more doses of the pharmaceutical composition are administered to the subject bi-weekly.

[0238] In some embodiments, a pharmaceutical composition is administered intravenously. In some embodiments, a pharmaceutical composition is administered intramuscularly. In some embodiments, a pharmaceutical composition is administered subcutaneously.

[0239] In some embodiments, a subject has or is at risk of developing an HIV infection.

[0240] In some embodiments, a method is a method of treating an HIV infection.

[0241] In some embodiments, a method is a method of preventing an HIV infection.

[0242] Also provided herein are uses of polyribonucleotides, compositions, and pharmaceutical compositions described herein.

[0243] In some embodiments, provided are uses of a composition or pharmaceutical composition as provided herein for the treatment of HIV in a subject.

[0244] In some embodiments, provided are uses of a composition or pharmaceutical composition as provided herein for the prevention of HIV in a subject.

[0245] In some embodiments, a subject has or is at risk of developing an HIV infection

[0246] Further, the present disclosure provides methods of producing an antibody agent. In some embodiments, a method comprises administering to cells a composition or pharmaceutical composition as provided herein so that the cells express and secrete the antibody agent.

[0247] In some embodiments, cells are liver cells.

[0248] In some embodiments, cells are in a subject.

[0249] In some embodiments, cells are ex vivo cells.

[0250] In some embodiments, an antibody agent is produced at a therapeutically relevant plasma concentration or a therapeutically relevant serum concentration. In some embodiments, therapeutically relevant plasma concentration or the therapeutically relevant serum concentration is at least 1 μg/ml.

[0251] The present disclosure further provides methods of determining one or more features of an antibody agent expressed from a polyribonucleotide, a composition or a pharmaceutical composition provided herein. In some embodiments, a polyribonucleotide, a composition or a pharmaceutical composition provided herein are introduced into cells. In some embodiments, one or more features comprises: (i) protein expression level of the antibody agent; (ii) binding specificity of the antibody agent to the CD4 binding site of HIV; (iii) efficacy of the antibody agent to mediate target cell death through antibody-dependent cellular cytotoxicity (ADCC); and (iv) efficacy of the antibody agent to mediate target cell death through complement dependent cytotoxicity (CDC).

[0252] The present disclosure further provides methods comprising contacting cells with a polyribonucleotide, a composition or a pharmaceutical composition provided herein. In some embodiments, a method further comprises detecting the antibody agent produced by the cells.

[0253] In some embodiments, cells are liver cells.

[0254] In some embodiments, the step of determining comprises comparing the one or more features of the antibody agent with that of a reference antibody that specifically binds to a CD4 binding site of HIV.

[0255] In some embodiments, the step of determining comprises assessing the protein expression level of the antibody agent above a threshold level.

[0256] In some embodiments, a threshold level is a level that is sufficient to induce ADCC.

[0257] In some embodiments, the step of determining comprises assessing binding of the antibody agent to a CD4 binding site of HIV.

[0258] In some embodiments, the step of determining comprises assessing the antibody agent in the TZM-bl cell pseudovirus neutralization assay at antibody agent concentrations up to 25 g/ml.

[0259] In some embodiments, cells are present in a subject.

[0260] In some embodiments, cells are ex vivo cells.

[0261] In some embodiments, one or more features include antibody level in one or more tissues in the subject.

[0262] The present disclosure also provides methods of manufacture. In some embodiments, a method comprises (a) determining one or more features of a polyribonucleotide, a composition or a pharmaceutical composition provided herein, which one or more features comprise or consist of:
[0263] (i) length and/or sequence of the polyribonucleotide;
[0264] (ii) integrity of the polyribonucleotide;
[0265] (iii) presence and/or location of one or more chemical moieties of the polyribonucleotide;
[0266] (iv) extent of expression of the antibody agent when the polyribonucleotide is introduced into a cell;
[0267] (v) stability of the polyribonucleotide or composition thereof;
[0268] (vi) level of antibody agent in a biological sample from an organism into which the polyribonucleotide has been introduced;
[0269] (vii) binding specificity of the antibody agent expressed from the polyribonucleotide, optionally to a CD4 binding site of HIV;
[0270] (viii) efficacy of the antibody agent to mediate target cell death through ADCC;
[0271] (ix) efficacy of the antibody agent to mediate target cell death through complement dependent cytotoxicity (CDC);
[0272] (x) lipid identity and amount/concentration within the composition;
[0273] (xi) size of lipid nanoparticles within the composition;
[0274] (xii) polydispersity of lipid nanoparticles within the composition;
[0275] (xiii) amount/concentration of the polyribonucleotide within the composition;
[0276] (xiv) extent of encapsulation of the polyribonucleotide within lipid nanoparticles;
[0277] (xv) a level of double stranded RNA; and
[0278] (xvi) combinations thereof;
   [0279] (B) comparing the one or more features of the polyribonucleotide with that of an appropriate reference standard; and
   [0280] (C) (i) designating the polyribonucleotide or composition thereof for one or more further steps of manufacturing and/or distribution if the comparison demonstrates that the polyribonucleotide or composition thereof meets or exceeds the reference standard; or
   [0281] (C) (ii) taking an alternative action if the comparison demonstrates that the polyribonucleotide or composition thereof does not meet or exceed the reference standard.

[0282] In some embodiments, a polyribonucleotide is assessed and the one or more further steps of step (C)(i) are or comprise at least formulation of the polyribonucleotide.

[0283] In some embodiments, a composition or the pharmaceutical composition is assessed, and the one or more further steps of step (C)(i) are or comprise release and distribution of the composition or the pharmaceutical composition.

[0284] The present disclosure thus provides technologies that allow for multiple anti-HIV antibodies to be expressed in a subject, increasing the breadth and potency of the anti-HIV antibodies present in a subject at one time and decreasing the likelihood of viral escape.

[0285] Provide technologies, including exemplary polyribonucleotides, compositions comprising such polyribonucleotides, and methods of making and using such polyribonucleotides, are described in more detail herein.

### BRIEF DESCRIPTION OF THE DRAWING

[0286] FIG. 1 shows a schematic of the HIV genome (1A) and the structure of a HIV virion particle (1B). Drawings modified from Musumeci et al., 2015 Molecules, which is incorporated herein by reference in its entirety.

[0287] FIG. 2 shows potential epitope regions on an HIV virion particle to which an antibody agent (e.g., a broadly neutralizing antibody (bNAb) or variant thereof) can bind. Drawings modified from McCoy and Burton, 2017 Immunol Rev., which is incorporated herein by reference in its entirety.

[0288] FIG. 3 shows an exemplary therapeutic strategy utilizing RiboMab technology as described herein for delivery and expression of anti-HIV RibobNAbs.

[0289] FIG. 4 shows exemplary formats of 1-18 RibobNAbs as described herein. Exemplary formats may include IgG (4A), CrossMab^{CH1-CLx} (4B), CrossMab^{CH1-CLcv} (4C), or various orientations/linkers of scFv-Fc RibobNAbs (4D and 4E).

[0290] FIG. 5 shows exemplary Fc modifications of 1-18 RibobNAbs as described herein. Exemplary RibobNAb formats may include an unmodified Fc domain (5A), or modifications shown in 5B-D, including GAALIE, /GAIE/GA/IE (5B), L/S, (5C), and/or knob-into-holes RibobNAbs (5D).

[0291] FIG. 6 shows schematics of exemplary polyribonucleotides which encode a heavy chain (6A) and a light chain (6B) of an exemplary 1-18 IgG1 antibody agent.

[0292] FIG. 7 shows % breadth and potency of various broadly neutralizing antibodies to HIV, including 1-18, as tested against a panel of 109 pseudoviruses.

[0293] FIG. 8 shows schematics of exemplary polyribonucleotides which encode scFv-Fc 1-18 antibody agents: 1-18 scFv-Fc VH-LL4/LL5-VL (8A) and 1-18 scFv-Fc VL-LL4/LL5-VH (8B).

[0294] FIG. 9 shows schematics of exemplary polyribonucleotides which encode heavy chain (9A) and light chain (9B) of an exemplary 1-18 CrossMab^{CH1-CLx} antibody agent.

[0295] FIG. 10 shows schematics of exemplary polyribonucleotides which encode heavy chain (10A) and light chain (10B) of an exemplary 1-18 CrossMab^{CH1-CLcv} antibody agent.

[0296] FIG. 11 shows exemplary concentrations in ng/ml of 1-18 and 1-18 L/S RibobNAbs compared to a control RiboMab as determined by Gyros ELISA from Example 5.

[0297] FIG. 12 shows exemplary Western Blot analysis of 1-18 and 1-18 L/S RibobNAbs compared to a control RiboMab under nonreducing and reducing conditions from Example 5.

[0298] FIG. 13 shows exemplary concentrations of scFv-Fc 1-18 L/S RibobNAbs (e.g., VH-LL4-VL, VL-LL5-VH, VH-LL5-VL, and VL-LL4-VH) compared to a control RiboMab and a parental IgG as determined by Gyros ELISA from Example 6.

[0299] FIG. 14 shows exemplary Western Blot analysis of scFv-Fc 1-18 L/S RibobNAbs (e.g., VH-LL4-VL, VL-LL5-VH, VH-LL5-VL, and VL-LL4-VH) compared to a control RiboMab and a parental IgG under nonreducing conditions from Example 6.

[0300] FIG. 15 shows exemplary Western Blot analysis of scFv-Fc 1-18 L/S RibobNAbs (e.g., VH-LL4-VL, VL-LL5-VH, VH-LL5-VL, and VL-LL4-VH) compared to a control RiboMab and a parental IgG under reducing conditions from Example 6.

[0301] FIG. 16 shows exemplary concentrations in ng/ml of CrossMab 1-18 L/S RibobNAbs (e.g., CrossMab^{CH1-CLcv} and CrossMab^{CH1-CLx}) compared to a control RiboMab and a parental Ab as determined by Gyros ELISA from Example 7.

[0302] FIG. 17 shows exemplary Western Blot analysis of CrossMab 1-18 L/S RibobNAbs (e.g., CrossMab^{CH1-CLcv} and CrossMab^{CH1-CLx}) compared to a control RiboMab and a parental Ab from Example 7.

[0303] FIG. 18 shows exemplary in vivo concentrations in μg/mL in log scale of 1-18 and 1-18 L/S RibobNAbs compared to a control RiboMab as determined by Gyros ELISA from Example 8.

[0304] FIG. 19 shows exemplary PK of 1-18 IgG, IgG L/S and scFv-Fc L/S RibobNAbs. Quantification of 1-18 RibobNAbs was performed using sera obtained from hFcRn NSG Tg32 mice. The in vivo concentrations in μg/ml are shown in log scale on the y-axis. The x-axis shows the time in hours of the respective blood sampling. Results of 1-18 VL-LL5-VH L/S scFv-Fc are depicted in comparison to 1-18 and 1-18 L/S IgG RibobNAbs as determined by Gyros ELISA from Example 12. Two different doses of the 1-18 VL-LL5-VH L/S scFv-Fc (30 μg and 19.56 μg) and 1-18 L/S IgG (30 μg and 10 μg) were analyzed.

[0305] FIG. 20 shows exemplary results from a psedovirus viral neutralization test (pVNT) where TSM.b1 cells were exposed to 1-18 IgG and 1-18 L/S IgG RibobNAbs and pseudoviruses CNE19 (clade B), q23.17 (clade A1), Tro.11 (clade B), RHPA4259.7 (clade B), 6540 V4_C1 (clade CRF01_AC), ZM269M.PL1 (clade C), and a Murine Leukemia Virus (MuLV) pseudovirus as a negative control. Results are expressed as IC50 and IC80 values or antibody/IgG concentrations resulting in a 50% and 80% reduction in relative luminescence units (RLUs) compared to untreated virus control wells.

[0306] FIG. 21 shows exemplary results from a pseudovirus viral neutralization test (pVNT), where TSM.b1 cells were exposed to 1-18 scFv-Fc L/S RibobNAbs and pseudoviruses CAP304_2_00_F6_6 (Clade C), CE1176_A3 (Clade C), 6980.V0.C31 (Clade C), 1012_11_TC21_3257 (Clade B), PVO.4 (Clade B), and a Murine Leukemia Virus (MuLV) pseudovirus as a negative control. Results are expressed as IC50 and IC80 values or antibody/IgG concentrations resulting in a 50% and 80% reduction in relative luminescence units (RLUs) compared to untreated virus control wells.

[0307] FIG. 22 shows exemplary results from a pseudovirus viral neutralization test (pVNT) where TSM.b1 cells were exposed to 1-18 scFv-Fc L/S RibobNAbs and pseudoviruses B), 6540 V4_C1 (clade CRF01_AC), ZM269M.PL1 (clade C), and a Murine Leukemia Virus (MuLV) pseudovirus as a negative control. Results are expressed as IC50 and IC80 values or antibody/IgG concentrations resulting in a 50% and 80% reduction in relative luminescence units (RLUs) compared to untreated virus control wells.

[0308] FIG. 23 shows exemplary results from a pseudovirus viral neutralization test (pVNT) where TSM.b1 cells were exposed to 1-18 CrossMab RibobNAbs and pseudoviruses CNE19 (clade B), q23.17 (clade A1), Tro.11 (clade B), RHPA4259.7 (clade B), R2184_C4 (clade CRF01_AE), and 6540_V4_C1 (clade CRF01_AC), and a Murine Leukemia Virus (MuLV) pseudovirus as a negative control. Results are expressed as IC50 and IC80 values or antibody/IgG concentrations resulting in a 50% and 80% reduction in relative luminescence units (RLUs) compared to untreated virus control wells.

### DEFINITIONS

[0309] Compounds of this disclosure include those described generally above and are further illustrated by the classes, subclasses, and species disclosed herein. As used herein, the following definitions shall apply unless otherwise indicated. For purposes of this disclosure, the chemical elements are identified in accordance with the Periodic Table of Elements, CAS version, Handbook of Chemistry and Physics, 75th Ed. Additionally, general principles of organic chemistry are described in “Organic Chemistry”, Thomas Sorrell, University Science Books, Sausalito: 1999, and “March's Advanced Organic Chemistry”, 5th Ed., Ed.: Smith, M. B. and March, J., John Wiley & Sons, New York: 2001, the entire contents of which are hereby incorporated by reference.

[0310] Unless otherwise stated, structures depicted herein are meant to include all stereoisomeric (e.g., enantiomeric or diastereomeric) forms of the structure, as well as all geometric or conformational isomeric forms of the structure. For example, the R and S configurations of each stereocenter are contemplated as part of the disclosure. Therefore, single stereochemical isomers, as well as enantiomeric, diastereomeric, and geometric (or conformational) mixtures of provided compounds are within the scope of the disclosure. For example, in some cases, provided compounds show one or more stereoisomers of a compound, and unless otherwise indicated, represents each stereoisomer alone and/or as a mixture. Unless otherwise stated, all tautomeric forms of provided compounds are within the scope of the disclosure.

[0311] Unless otherwise indicated, structures depicted herein are meant to include compounds that differ only in the presence of one or more isotopically enriched atoms. For example, compounds having the present structures including replacement of hydrogen by deuterium or tritium, or replacement of a carbon by 13C- or 14C-enriched carbon are within the scope of this disclosure.

[0312] About: The term “about”, when used herein in reference to a value, refers to a value that is similar, in context to the referenced value. In general, those skilled in the art, familiar with the context, will appreciate the relevant degree of variance encompassed by “about” in that context. For example, in some embodiments, the term “about” may encompass a range of values that within 25%, 20%, 19%, 18%, 17%, 16%, 15%, 14%, 13%, 12%, 11%, 10%, 9%, 8%, 7%, 6%, 5%, 4%, 3%, 2%, 1%, or less of the referred value.

[0313] Agent: As used herein, the term “agent,” may refer to a physical entity. In some embodiments, an agent may be characterized by a particular feature and/or effect. For example, as used herein, the term “therapeutic agent” refers to a physical entity has a therapeutic effect and/or elicits a desired biological and/or pharmacological effect. In some embodiments, an agent may be a compound, molecule, or entity of any chemical class including, for example, a small molecule, polypeptide, nucleic acid, saccharide, lipid, metal, or a combination or complex thereof.

[0314] Aliphatic: The term “aliphatic” refers to a straight-chain (i.e., unbranched) or branched, substituted or unsubstituted hydrocarbon chain that is completely saturated or that contains one or more units of unsaturation, or a monocyclic hydrocarbon or bicyclic hydrocarbon that is completely saturated or that contains one or more units of unsaturation, but which is not aromatic (also referred to herein as “cycloaliphatic”), that has a single point or more than one points of attachment to the rest of the molecule. Unless otherwise specified, aliphatic groups contain 1-12 aliphatic carbon atoms. In some embodiments, aliphatic groups contain 1-6 aliphatic carbon atoms (e.g., C₁₋₆). In some embodiments, aliphatic groups contain 1-5 aliphatic carbon atoms (e.g., C₁₋₅). In other embodiments, aliphatic groups contain 1-4 aliphatic carbon atoms (e.g., C₁₋₄). In still other embodiments, aliphatic groups contain 1-3 aliphatic carbon atoms (e.g., C₁₋₃), and in yet other embodiments, aliphatic groups contain 1-2 aliphatic carbon atoms (e.g., C₁₋₂). Suitable aliphatic groups include, but are not limited to, linear or branched, substituted or unsubstituted alkyl, alkenyl, or alkynyl groups and hybrids thereof. A preferred aliphatic group is C₁₋₆ alkyl.

[0315] Alkyl: The term “alkyl,” used alone or as part of a larger moiety, refers to a saturated, optionally substituted straight or branched chain hydrocarbon group having (unless otherwise specified) 1-12, 1-10, 1-8, 1-6, 1-4, 1-3, or 1-2 carbon atoms (e.g., C₁₋₁₂, C₁₋₁₀, C₁₋₈, C₁₋₆, C₁₋₄, C₁₋₃, or C₁₋₂). Exemplary alkyl groups include methyl, ethyl, propyl, butyl, pentyl, hexyl, and heptyl.

[0316] Alkylene: The term “alkylene” is refers to a bivalent alkyl group. In some embodiments, “alkylene” is a bivalent straight or branched alkyl group. In some embodiments, an “alkylene chain” is a polymethylene group, i.e., —(CH₂)ₙ—, wherein n is a positive integer, e.g., from 1 to 6, from 1 to 4, from 1 to 3, from 1 to 2, or from 2 to 3. An optionally substituted alkylene chain is a polymethylene group in which one or more methylene hydrogen atoms is optionally replaced with a substituent. Suitable substituents include those described below for a substituted aliphatic group and also include those described in the specification herein. It will be appreciated that two substituents of the alkylene group may be taken together to form a ring system. In certain embodiments, two substituents can be taken together to form a 3- to 7-membered ring. The substituents can be on the same or different atoms. The suffix “-ene” or “-enyl” when appended to certain groups herein are intended to refer to a bifunctional moiety of said group. For example, “-ene” or “-enyl”, when appended to “cyclopropyl” becomes “cyclopropylene” or “cyclopropylenyl” and is intended to refer to a bifunctional cyclopropyl group, e.g.,

[chemical structure]

[0317] Alkenyl: The term “alkenyl”, used alone or as part of a larger moiety, refers to an optionally substituted straight or branched chain or cyclic hydrocarbon group having at least one double bond and having (unless otherwise specified) 2-12, 2-10, 2-8, 2-6, 2-4, or 2-3 carbon atoms (e.g., C₂₋₁₂, C₂₋₁₀, C₂₋₈, C₂₋₆, C₂₋₄, or C₂₋₃). Exemplary alkenyl groups include ethenyl, propenyl, butenyl, pentenyl, hexenyl, and heptenyl. The term “cycloalkenyl” refers to an optionally substituted non-aromatic monocyclic or multicyclic ring system containing at least one carbon-carbon double bond and having about 3 to about 10 carbon atoms. Exemplary monocyclic cycloalkenyl rings include cyclopentenyl, cyclohexenyl, and cycloheptenyl.

[0318] Alkynyl: The term “alkynyl”, used alone or as part of a larger moiety, refers to an optionally substituted straight or branched chain hydrocarbon group having at least one triple bond and having (unless otherwise specified) 2-12, 2-10, 2-8, 2-6, 2-4, or 2-3 carbon atoms (e.g., C₂₋₁₂, C₂₋₁₀, C₂₋₈, C₂₋₆, C₂₋₄, or C₂₋₃). Exemplary alkynyl groups include ethynyl, propynyl, butynyl, pentynyl, hexynyl, and heptynyl.

[0319] Amino acid: In its broadest sense, as used herein, the term “amino acid” refers to a compound and/or substance that can be, is, or has been incorporated into a polypeptide chain, e.g., through formation of one or more peptide bonds. In some embodiments, an amino acid has the general structure H₂N—C(H)(R)—COOH. In some embodiments, an amino acid is a naturally-occurring amino acid. In some embodiments, an amino acid is a non-natural amino acid; in some embodiments, an amino acid is a D-amino acid; in some embodiments, an amino acid is an L-amino acid. “Standard amino acid” refers to any of the twenty standard L-amino acids commonly found in naturally occurring peptides. “Nonstandard amino acid” refers to any amino acid, other than the standard amino acids, regardless of whether it is prepared synthetically or obtained from a natural source. In some embodiments, an amino acid, including a carboxy- and/or amino-terminal amino acid in a polypeptide, can contain a structural modification as compared with the general structure above. For example, in some embodiments, an amino acid may be modified by methylation, amidation, acetylation, pegylation, glycosylation, phosphorylation, and/or substitution (e.g., of the amino group, the carboxylic acid group, one or more protons, and/or the hydroxyl group) as compared with the general structure. In some embodiments, such modification may, for example, alter the circulating half-life of a polypeptide containing the modified amino acid as compared with one containing an otherwise identical unmodified amino acid. In some embodiments, such modification does not significantly alter a relevant activity of a polypeptide containing the modified amino acid, as compared with one containing an otherwise identical unmodified amino acid. As will be clear from context, in some embodiments, the term “amino acid” may be used to refer to a free amino acid; in some embodiments it may be used to refer to an amino acid residue of a polypeptide.

[0320] Antibody agent: As used herein, the term “antibody agent” refers to any polypeptide or polypeptide complex that includes immunoglobulin structural elements sufficient to confer specific binding to a particular antigen. Exemplary antibody agents include, but are not limited to monoclonal antibodies or polyclonal antibodies. In some embodiments, an antibody agent may include one or more constant region sequences that are characteristic of mouse, rabbit, primate, or human antibodies. In some embodiments, an antibody agent may include one or more sequence elements are humanized, primatized, chimeric, etc., as is known in the art. In some embodiments, the term “antibody agent” is used to refer to one or more of the art-known or developed constructs or formats for utilizing antibody structural and functional features in alternative presentation. For example, in some embodiments, an antibody agent utilized in accordance with the present disclosure is in a format selected from, but not limited to, intact IgA, IgG, IgE or IgM antibodies; bi- or multi-specific antibodies (e.g., Zybodies®, etc.); CrossMabs (e.g., CrossMab^{CH1-CL}; CrossMab^{CH1-CLcv}; bispecific CrossMab^{CH1-CL} with knob-in-hole); antibody fragments such as Fab fragments, Fab′ fragments, F(ab′)2 fragments, Fd′ fragments, Fd fragments, and isolated complementarity determining regions (CDRs) or sets thereof; single chain Fvs (scFvs); scFv-Fc fusions; polypeptide-Fc fusions; single domain antibodies (e.g., shark single domain antibodies such as IgNAR or fragments thereof); cameloid antibodies; masked antibodies (e.g., Probodies®); Small Modular ImmunoPharmaceuticals (“SMIPs™”); single chain or Tandem diabodies (TandAb®); VHHs; Anticalins®; Nanobodies® minibodies; BiTE®s; ankyrin repeat proteins or DARPINS®; Avimers®; DARTs; TCR-like antibodies; Adnectins®; Affilins®; Trans-Bodies®; Affibodies®; TrimerX®; MicroProteins; Fynomers®, Centyrins®; and KALBITOR®s. In some embodiments, chains and/or fragments of such antibodies and fragments may be used in combination, e.g., a scFv-Fc arm with a conventional antibody arm. In some embodiments, an antibody agent is a broadly neutralizing antibody agent (e.g., a broadly neutralizing antibody (bNAb)). A “broadly neutralizing antibody agent” is an antibody agent that is capable of neutralizing two or more genetic variants (e.g., strains) of a virus (e.g., HIV). In some embodiments, an antibody may lack a covalent modification (e.g., attachment of a glycan) that it would have if produced naturally. In some embodiments, an antibody may contain a covalent modification (e.g., attachment of a glycan, a payload (e.g., a detectable moiety, a therapeutic moiety, a catalytic moiety, etc.), or other pendant group (e.g., poly-ethylene glycol, etc.)). In many embodiments, an antibody agent is or comprises a polypeptide whose amino acid sequence includes one or more structural elements recognized by those skilled in the art as a complementarity determining region (CDR); in some embodiments an antibody agent is or comprises a polypeptide whose amino acid sequence includes at least one CDR (e.g., at least one heavy chain CDR and/or at least one light chain CDR) that is substantially identical to one found in a reference antibody. In some embodiments an included CDR is substantially identical to a reference CDR in that it is either identical in sequence or contains between 1-5 amino acid substitutions as compared with the reference CDR. In some embodiments an included CDR is substantially identical to a reference CDR in that it shows at least 85%, 86%, 87%, 88%, 89%, 90%, 91%, 92%, 93%, 94%, 95%, 96%, 97%, 98%, 99%, or 100% sequence identity with the reference CDR. In some embodiments, an included CDR is substantially identical to a reference CDR in that it shows at least 95%, 96%, 97%, 98%, 99%, or 100% sequence identity with the reference CDR. In some embodiments an included CDR is substantially identical to a reference CDR in that at least one amino acid within the included CDR is deleted, added, or substituted as compared with the reference CDR but the included CDR has an amino acid sequence that is otherwise identical with that of the reference CDR. In some embodiments an included CDR is substantially identical to a reference CDR in that 1-5 amino acids within the included CDR are deleted, added, or substituted as compared with the reference CDR but the included CDR has an amino acid sequence that is otherwise identical to the reference CDR. In some embodiments, an included CDR is substantially identical to a reference CDR in that at least one amino acid within the included CDR is substituted as compared with the reference CDR but the included CDR has an amino acid sequence that is otherwise identical with that of the reference CDR. In some embodiments, an included CDR is substantially identical to a reference CDR in that 1-5 amino acids within the included CDR are deleted, added, or substituted as compared with the reference CDR but the included CDR has an amino acid sequence that is otherwise identical to the reference CDR. In some embodiments, an antibody agent is or comprises a polypeptide whose amino acid sequence includes structural elements recognized by those skilled in the art as an immunoglobulin variable domain. In some embodiments, an antibody agent is a polypeptide protein having a binding domain which is homologous or largely homologous to an immunoglobulin-binding domain.

[0321] Aryl: The term “aryl” refers to monocyclic and bicyclic ring systems having a total of six to fourteen ring members (e.g., C6-C14), wherein at least one ring in the system is aromatic and wherein each ring in the system contains three to seven ring members. In some embodiments, an “aryl” group contains between six and twelve total ring members (e.g., C6-C12). The term “aryl” may be used interchangeably with the term “aryl ring”. In certain embodiments, “aryl” refers to an aromatic ring system which includes, but not limited to, phenyl, biphenyl, naphthyl, anthracyl and the like, which may bear one or more substituents. Unless otherwise specified, “aryl” groups are hydrocarbons. In some embodiments, an “aryl” ring system is an aromatic ring (e.g., phenyl) that is fused to a non-aromatic ring (e.g., cycloalkyl). Examples of aryl rings include that are fused include

[chemical structure]

[0322] Associated: Two events or entities are “associated” with one another, as that term is used herein, if the presence, level, degree, type and/or form of one is correlated with that of the other. For example, a particular entity (e.g., polypeptide, genetic signature, metabolite, microbe, etc.) is considered to be associated with a particular disease, disorder, or condition, if its presence, level and/or form correlates with incidence of, susceptibility to, severity of, stage of, etc. the disease, disorder, or condition (e.g., across a relevant population). In some embodiments, two or more entities are physically “associated” with one another if they interact, directly or indirectly, so that they are and/or remain in physical proximity with one another. In some embodiments, two or more entities that are physically associated with one another are covalently linked to one another; in some embodiments, two or more entities that are physically associated with one another are not covalently linked to one another but are non-covalently associated, for example by means of hydrogen bonds, van der Waals interaction, hydrophobic interactions, magnetism, and combinations thereof.

[0323] Co-administration: As used herein, the term “co-administration” refers to use of a composition (e.g., a pharmaceutical composition) described herein and one or more additional therapeutic agents. In some embodiments, one or more additional therapeutic agents comprises at least one polyribonucleotide encoding another antibody agent (e.g., an anti-HIV antigen antibody agent). The combined use of a composition (e.g., a pharmaceutical composition) described herein and an additional therapeutic agent may be performed concurrently or separately (e.g., sequentially in any order). In some embodiments, a composition (e.g., a pharmaceutical composition) described herein and an additional therapeutic agent may be combined in one pharmaceutically-acceptable excipient, or they may be placed in separate excipient and delivered to a target cell or administered to a subject at different times. Each of these situations is contemplated as falling within the meaning of “co-administration” or “combination,” provided that a composition (e.g., a pharmaceutical composition) described herein and an additional therapeutic agent are delivered or administered sufficiently close in time that there is at least some temporal overlap in biological effect(s) generated by each on a target cell or a subject being treated.

[0324] Combination therapy: As used herein, the term “combination therapy” refers to those situations in which a subject is simultaneously exposed to two or more therapeutic regimens (e.g., two or more therapeutic agents (e.g., two or more antibody agents)). In some embodiments, the two or more regimens may be administered simultaneously; in some embodiments, such regimens may be administered sequentially (e.g., all “doses” of a first regimen are administered prior to administration of any doses of a second regimen); in some embodiments, such agents are administered in overlapping dosing regimens. In some embodiments, administration of combination therapy may involve administration of one or more agent(s) or modality(ies) to a subject receiving the other agent(s) or modality(ies) in the combination. For clarity, combination therapy does not require that individual agents be administered together in a single composition (or even necessarily at the same time), although in some embodiments, two or more agents, or active moieties thereof, may be administered together in a combination composition. In some embodiments, a combination therapy comprises polyribonucleotides encoding two or more antibody agents (e.g., anti-HIV antibody agents).

[0325] Comparable: As used herein, the term “comparable” refers to two or more agents, entities, situations, sets of conditions, etc., that may not be identical to one another but that are sufficiently similar to permit comparison there between so that one skilled in the art will appreciate that conclusions may reasonably be drawn based on differences or similarities observed. In some embodiments, comparable sets of conditions, circumstances, individuals, or populations are characterized by a plurality of substantially identical features and one or a small number of varied features. Those of ordinary skill in the art will understand, in context, what degree of identity is required in any given circumstance for two or more such agents, entities, situations, sets of conditions, etc. to be considered comparable. For example, those of ordinary skill in the art will appreciate that sets of circumstances, individuals, or populations are comparable to one another when characterized by a sufficient number and type of substantially identical features to warrant a reasonable conclusion that differences in results obtained or phenomena observed under or with different sets of circumstances, individuals, or populations are caused by or indicative of the variation in those features that are varied.

[0326] Corresponding to: As used herein, the term “corresponding to” refers to a relationship between two or more entities. For example, the term “corresponding to” may be used to designate the position/identity of a structural element in a compound or composition relative to another compound or composition (e.g., to an appropriate reference compound or composition). For example, in some embodiments, a monomeric residue in a polymer (e.g., an amino acid residue in a polypeptide or a nucleic acid residue in a polynucleotide) may be identified as “corresponding to” a residue in an appropriate reference polymer. For example, those of ordinary skill will appreciate that, for purposes of simplicity, residues in a polypeptide are often designated using a canonical numbering system based on a reference related polypeptide, so that an amino acid “corresponding to” a residue at position 190, for example, need not actually be the 190^{th} amino acid in a particular amino acid chain but rather corresponds to the residue found at 190 in the reference polypeptide; those of ordinary skill in the art readily appreciate how to identify “corresponding” amino acids. For example, those skilled in the art will be aware of various sequence alignment strategies, including software programs such as, for example, BLAST, CS-BLAST, CUSASW++, DIAMOND, FASTA, GGSEARCH/GLSEARCH, Genoogle, HMMER, HHpred/HHsearch, IDF, Infernal, KLAST, USEARCH, parasail, PSI-BLAST, PSI-Search, ScalaBLAST, Sequilab, SAM, SSEARCH, SWAPHI, SWAPHI-LS, SWIMM, or SWIPE that can be utilized, for example, to identify “corresponding” residues in polypeptides and/or nucleic acids in accordance with the present disclosure. Those of skill in the art will also appreciate that, in some instances, the term “corresponding to” may be used to describe an event or entity that shares a relevant similarity with another event or entity (e.g., an appropriate reference event or entity). To give but one example, a gene or protein in one organism may be described as “corresponding to” a gene or protein from another organism in order to indicate, in some embodiments, that it plays an analogous role or performs an analogous function and/or that it shows a particular degree of sequence identity or homology, or shares a particular characteristic sequence element.

[0327] Cycloaliphatic: As used herein, the term “cycloaliphatic” refers to a monocyclic C₃₋₈ hydrocarbon or a bicyclic C₆₋₁₀ hydrocarbon that is completely saturated or that contains one or more units of unsaturation, but which is not aromatic, that has a single point or more than one points of attachment to the rest of the molecule.

[0328] Cycloalkyl: As used herein, the term “cycloalkyl” refers to an optionally substituted saturated ring monocyclic or polycyclic system of about 3 to about 10 ring carbon atoms. Exemplary monocyclic cycloalkyl rings include cyclopropyl, cyclobutyl, cyclopentyl, cyclohexyl, and cycloheptyl.

[0329] Derived: In the context of an amino acid sequence (peptide or polypeptide) “derived from” a designated amino acid sequence (peptide or polypeptide), it refers to a structural analogue of a designated amino acid sequence. In some embodiments, an amino acid sequence which is derived from a particular amino acid sequence has an amino acid sequence that is identical, essentially identical or homologous to that particular sequence or a fragment thereof. Amino acid sequences derived from a particular amino acid sequence may be variants of that particular sequence or a fragment thereof. For example, antibody agents utilized according to the present disclosure may include amino acid sequences (e.g., CDRs, variable domains, constant domains, etc.) derived from other antibodies, e.g., naturally produced antibodies.

[0330] Detecting: The term “detecting” is used broadly herein to include appropriate means of determining the presence or absence of an entity of interest or any form of measurement of an entity of interest in a sample. Thus, “detecting” may include determining, measuring, assessing, or assaying the presence or absence, level, amount, and/or location of an entity of interest. Quantitative and qualitative determinations, measurements or assessments are included, including semi-quantitative. Such determinations, measurements or assessments may be relative, for example when an entity of interest is being detected relative to a control reference, or absolute. As such, the term “quantifying” when used in the context of quantifying an entity of interest can refer to absolute or to relative quantification. Absolute quantification may be accomplished by correlating a detected level of an entity of interest to known control standards (e.g., through generation of a standard curve). Alternatively, relative quantification can be accomplished by comparison of detected levels or amounts between two or more different entities of interest to provide a relative quantification of each of the two or more different entities of interest, i.e., relative to each other.

[0331] Dosing regimen: Those skilled in the art will appreciate that the term “dosing regimen” (or “therapeutic regimen”) may be used to refer to a set of unit doses (typically more than one) that are administered individually to a subject, typically separated by periods of time. In some embodiments, a given therapeutic agent has a recommended dosing regimen, which may involve one or more doses.

[0332] Encode: As used herein, the term “encode” or “encoding” refers to sequence information of a first molecule that guides production of a second molecule having a defined sequence of nucleotides (e.g., a polyribonucleotide) or a defined sequence of amino acids. For example, a DNA molecule can encode an RNA molecule (e.g., by a transcription process that includes a DNA-dependent RNA polymerase enzyme). An RNA molecule can encode a polypeptide (e.g., by a translation process). Thus, a gene, a cDNA, or an RNA molecule encodes a polypeptide if transcription and translation of RNA corresponding to that gene produces the polypeptide in a cell or other biological system. In some embodiments, a coding region of a polyribonucleotide encoding a target antigen refers to a coding strand, the nucleotide sequence of which is identical to the polyribonucleotide sequence of such a target antigen. In some embodiments, a coding region of a polyribonucleotide encoding a target antigen refers to a non-coding strand of such a target antigen, which may be used as a template for transcription of a gene or cDNA.

[0333] Engineered: In general, the term “engineered” refers to the aspect of having been manipulated by the hand of man. For example, a polynucleotide is considered to be “engineered” when two or more sequences that are not linked together in that order in nature are manipulated by the hand of man to be directly linked to one another in the engineered polynucleotide and/or when a particular residue in a polynucleotide is non-naturally occurring and/or is caused through action of the hand of man to be linked with an entity or moiety with which it is not linked in nature.

[0334] Epitope: As used herein, the term “epitope” refers to a moiety that is specifically recognized by an immunoglobulin (e.g., antibody or receptor) binding component. For example, an epitope may be recognized by a T cell, a B cell, or an antibody. In some embodiments, an epitope is comprised of a plurality of chemical atoms or groups on an antigen. In some embodiments, such chemical atoms or groups are surface-exposed when the antigen adopts a relevant three-dimensional conformation. In some embodiments, such chemical atoms or groups are physically near to each other in space when the antigen adopts such a conformation. In some embodiments, at least some such chemical atoms are groups are physically separated from one another when the antigen adopts an alternative conformation (e.g., is linearized). Accordingly, in some embodiments, an epitope of an antigen may include a continuous or discontinuous portion of the antigen. In some embodiments, an epitope is or comprises a T cell epitope. In some embodiments, an epitope may have a length of about 5 to about 30 amino acids, or about 10 to about 25 amino acids, or about 5 to about 15 amino acids, or about 5 to 12 amino acids, or about 6 to about 9 amino acids.

[0335] Expression: As used herein, the term “expression” of a nucleic acid sequence refers to the generation of a gene product from the nucleic acid sequence. In some embodiments, a gene product can be a transcript, e.g., a polyribonucleotide as provided herein. In some embodiments, a gene product can be a polypeptide. In some embodiments, expression of a nucleic acid sequence involves one or more of the following: (1) production of an RNA template from a DNA sequence (e.g., by transcription); (2) processing of an RNA transcript (e.g., by splicing, editing, etc.); (3) translation of an RNA into a polypeptide or protein; and/or (4) post-translational modification of a polypeptide or protein.

[0336] Heteroaliphatic: The term “heteroaliphatic” or “heteroaliphatic group,” as used herein, denotes an optionally substituted hydrocarbon moiety having, in addition to carbon atoms, from one to five heteroatoms, that may be straight-chain (i.e., unbranched), branched, or cyclic (“heterocyclic”) and may be completely saturated or may contain one or more units of unsaturation, but which is not aromatic. The term “heteroatom” refers to nitrogen, oxygen, or sulfur, and includes any oxidized form of nitrogen or sulfur, and any quaternized form of a basic nitrogen. The term “nitrogen” also includes a substituted nitrogen. Unless otherwise specified, heteroaliphatic groups contain 1-10 carbon atoms wherein 1-3 carbon atoms are optionally and independently replaced with heteroatoms selected from oxygen, nitrogen, and sulfur. In some embodiments, heteroaliphatic groups contain 1-4 carbon atoms, wherein 1-2 carbon atoms are optionally and independently replaced with heteroatoms selected from oxygen, nitrogen, and sulfur. In yet other embodiments, heteroaliphatic groups contain 1-3 carbon atoms, wherein 1 carbon atom is optionally and independently replaced with a heteroatom selected from oxygen, nitrogen, and sulfur. Suitable heteroaliphatic groups include, but are not limited to, linear or branched, heteroalkyl, heteroalkenyl, and heteroalkynyl groups. For example, a 1- to 10 atom heteroaliphatic group includes the following exemplary groups: —O—CH₃, —CH₂—O—CH₃, —O—CH₂—CH₂—O—CH₂—CH₂—O—CH₃, and the like.

[0337] Heteroaryl: The terms “heteroaryl” and “heteroar-”, used alone or as part of a larger moiety, e.g., “heteroaralkyl”, or “heteroaralkoxy”, refer to monocyclic or bicyclic ring groups having 5 to 10 ring atoms (e.g., 5- to 6-membered monocyclic heteroaryl or 9- to 10-membered bicyclic heteroaryl); having 6, 10, or 14 It-electrons shared in a cyclic array; and having, in addition to carbon atoms, from one to five heteroatoms. Heteroaryl groups include, without limitation, thienyl, furanyl, pyrrolyl, imidazolyl, pyrazolyl, triazolyl, tetrazolyl, oxazolyl, isoxazolyl, oxadiazolyl, thiazolyl, isothiazolyl, thiadiazolyl, pyridyl, pyridazinyl, pyrimidinyl, pyrazinyl, indolizinyl, purinyl, naphthyridinyl, pteridinyl, imidazo[1,2-a]pyrimidinyl, imidazo[1,2-a]pyridyl, imidazo[4,5-b]pyridyl, imidazo[4,5-c]pyridyl, pyrrolopyridyl, pyrrolopyrazinyl, thienopyrimidinyl, triazolopyridyl, and benzoisoxazolyl. The terms “heteroaryl” and “heteroar-”, as used herein, also include groups in which a heteroaromatic ring is fused to one or more aryl, cycloaliphatic, or heterocyclyl rings, where the radical or point of attachment is on the heteroaromatic ring (i.e., a bicyclic heteroaryl ring having 1 to 3 heteroatoms). Nonlimiting examples include indolyl, isoindolyl, benzothienyl, benzofuranyl, dibenzofuranyl, indazolyl, benzimidazolyl, benzotriazolyl, benzothiazolyl, benzothiadiazolyl, benzoxazolyl, quinolyl, isoquinolyl, cinnolinyl, phthalazinyl, quinazolinyl, quinoxalinyl, 4H-quinolizinyl, carbazolyl, acridinyl, phenazinyl, phenothiazinyl, phenoxazinyl, tetrahydroquinolinyl, tetrahydroisoquinolinyl, pyrido[2,3-b]-1,4-oxazin-3(4H)-one, 4H-thieno[3,2-b]pyrrole, and benzoisoxazolyl. The term “heteroaryl” may be used interchangeably with the terms “heteroaryl ring”, “heteroaryl group”, or “heteroaromatic”, any of which terms include rings that are optionally substituted.

[0338] Heteroatom: The term “heteroatom” as used herein refers to nitrogen, oxygen, or sulfur, and includes any oxidized form of nitrogen or sulfur, and any quaternized form of a basic nitrogen.

[0339] Heterocycle: As used herein, the terms “heterocycle”, “heterocyclyl”, “heterocyclic radical”, and “heterocyclic ring” are used interchangeably and refer to a stable 3- to 8-membered monocyclic, a 6- to 10-membered bicyclic, or a 10- to 16-membered polycyclic heterocyclic moiety that is either saturated or partially unsaturated, and having, in addition to carbon atoms, one or more, such as one to four, heteroatoms, as defined above. When used in reference to a ring atom of a heterocycle, the term “nitrogen” includes a substituted nitrogen. As an example, in a saturated or partially unsaturated ring having 0-3 heteroatoms selected from oxygen, sulfur or nitrogen, the nitrogen may be N (as in 3,4-dihydro-2H-pyrrolyl), NH (as in pyrrolidinyl), or NR⁺ (as in N-substituted pyrrolidinyl). A heterocyclic ring can be attached to its pendant group at any heteroatom or carbon atom that results in a stable structure and any of the ring atoms can be optionally substituted. Examples of such saturated or partially unsaturated heterocyclic radicals include, without limitation, azetidinyl, oxetanyl, tetrahydrofuranyl, tetrahydrothienyl, pyrrolidinyl, piperidinyl, decahydroquinolinyl, oxazolidinyl, piperazinyl, dioxanyl, dioxolanyl, diazepinyl, oxazepinyl, thiazepinyl, morpholinyl, and thiamorpholinyl. A heterocyclyl group may be mono-, bi-, tri-, or polycyclic, preferably mono-, bi-, or tricyclic, more preferably mono- or bicyclic. A bicyclic heterocyclic ring also includes groups in which the heterocyclic ring is fused to one or more aryl rings. Exemplary bicyclic heterocyclic groups include indolinyl, isoindolinyl, benzodioxolyl, 1,3-dihydroisobenzofuranyl, 2,3-dihydrobenzofuranyl, and tetrahydroquinolinyl. A bicyclic heterocyclic ring can also be a spirocyclic ring system (e.g., 7- to 11-membered spirocyclic fused heterocyclic ring having, in addition to carbon atoms, one or more heteroatoms as defined above (e.g., one, two, three or four heteroatoms)). A bicyclic heterocyclic ring can also be a bridged ring system (e.g., 7- to 11-membered bridged heterocyclic ring having one, two, or three bridging atoms.

[0340] Homology: As used herein, the term “homology” or “homolog” refers to the overall relatedness between polynucleotide molecules (e.g., DNA molecules and/or RNA molecules) and/or between polypeptide molecules. In some embodiments, polynucleotide molecules (e.g., DNA molecules and/or RNA molecules) and/or polypeptide molecules are considered to be “homologous” to one another if their sequences are at least 15%, 20%, 25%, 30%, 35%, 40%, 45%, 50%, 55%, 60%, 65%, 70%, 75%, 80%, 85%, 90%, 95%, or 99% identical. In some embodiments, polynucleotide molecules (e.g., DNA molecules and/or RNA molecules) and/or polypeptide molecules are considered to be “homologous” to one another if their sequences are at least 25%, 30%, 35%, 40%, 45%, 50%, 55%, 60%, 65%, 70%, 75%, 80%, 85%, 90%, 95%, or 99% similar (e.g., containing residues with related chemical properties at corresponding positions). For example, as is well known by those of ordinary skill in the art, certain amino acids are typically classified as similar to one another as “hydrophobic” or “hydrophilic” amino acids, and/or as having “polar” or “non-polar” side chains. Substitution of one amino acid for another of the same type may often be considered a “homologous” substitution.

[0341] Identity: As used herein, the term “identity” refers to the overall relatedness between polynucleotide molecules (e.g., DNA molecules and/or RNA molecules) and/or between polypeptide molecules. In some embodiments, polynucleotide molecules (e.g., DNA molecules and/or RNA molecules) and/or between polypeptide molecules are considered to be “substantially identical” to one another if their sequences are at least 80%, 85%, 90%, 95%, 96%, 97%, 98%, or 99% identical. Calculation of the percent identity of two nucleic acid or polypeptide sequences, for example, can be performed by aligning the two sequences for optimal comparison purposes (e.g., gaps can be introduced in one or both of a first and a second sequence for optimal alignment and non-identical sequences can be disregarded for comparison purposes). In certain embodiments, the length of a sequence aligned for comparison purposes is at least 30%, at least 40%, at least 50%, at least 60%, at least 70%, at least 75%, at least 80%, at least 85%, at least 90%, at least 95%, at least 96%, at least 97%, at least 98%, at least 99%, or substantially 100% of the length of a reference sequence. The nucleotides at corresponding positions are then compared. When a position in the first sequence is occupied by the same residue (e.g., nucleotide or amino acid) as the corresponding position in the second sequence, then the molecules are identical at that position. The percent identity between the two sequences is a function of the number of identical positions shared by the sequences, taking into account the number of gaps, and the length of each gap, which needs to be introduced for optimal alignment of the two sequences. The comparison of sequences and determination of percent identity between two sequences can be accomplished using a mathematical algorithm. For example, the percent identity between two nucleotide sequences can be determined using the algorithm of Meyers and Miller, 1989, which has been incorporated into the ALIGN program (version 2.0). In some exemplary embodiments, nucleic acid sequence comparisons made with the ALIGN program use a PAM120 weight residue table, a gap length penalty of 12 and a gap penalty of 4. The percent identity between two nucleotide sequences can, alternatively, be determined using the GAP program in the GCG software package using an NWSgapdna.CMP matrix.

[0342] Increased, Induced, or Reduced: As used herein, these terms or grammatically comparable comparative terms, indicate values that are relative to a comparable reference measurement. For example, in some embodiments, an assessed value achieved with a provided composition (e.g., a pharmaceutical composition) may be “increased” relative to that obtained with a comparable reference composition. Alternatively or additionally, in some embodiments, an assessed value achieved in a subject may be “increased” relative to that obtained in the same subject under different conditions (e.g., prior to or after an event; or presence or absence of an event such as administration of a composition (e.g., a pharmaceutical composition) as described herein, or in a different, comparable subject (e.g., in a comparable subject that differs from the subject of interest in prior exposure to a condition, e.g., absence of administration of a composition (e.g., a pharmaceutical composition) as described herein.). In some embodiments, comparative terms refer to statistically relevant differences (e.g., that are of a prevalence and/or magnitude sufficient to achieve statistical relevance). Those skilled in the art will be aware, or will readily be able to determine, in a given context, a degree and/or prevalence of difference that is required or sufficient to achieve such statistical significance. In some embodiments, the term “reduced” or equivalent terms refers to a reduction in the level of an assessed value by at least 5%, at least 10%, at least 20%, at least 50%, at least 75% or higher, as compared to a comparable reference. In some embodiments, the term “reduced” or equivalent terms refers to a complete or essentially complete inhibition, i.e., a reduction to zero or essentially to zero. In some embodiments, the term “increased” or “induced” refers to an increase in the level of an assessed value by at least 10%, at least 20%, at least 30%, at least 40%, at least 50%, at least 80%, at least 100%, at least 200%, at least 500%, or higher, as compared to a comparable reference.

[0343] In order: As used herein with reference to a polynucleotide or polyribonucleotide, “in order” refers to the order of features from 5′ to 3′ along the polynucleotide or polyribonucleotide. As used herein with reference to a polypeptide, “in order” refers to the order of features moving from the N-terminal-most of the features to the C-terminal-most of the features along the polypeptide. “In order” does not mean that no additional features can be present among the listed features. For example, if Features A, B, and C of a polynucleotide are described herein as being “in order, Feature A, Feature B, and Feature C,” this description does not exclude, e.g., Feature D being located between Features A and B.

[0344] Ionizable: The term “ionizable” refers to a compound or group or atom that is charged at a certain pH. In the context of an ionizable amino lipid, such a lipid or a function group or atom thereof bears a positive charge at a certain pH. In some embodiments, an ionizable amino lipid is positively charged at an acidic pH. In some embodiments, an ionizable amino lipid is predominately neutral at physiological pH values, e.g., in some embodiments about 7.0-7.4, but becomes positively charged at lower pH values. In some embodiments, an ionizable amino lipid may have a pKa within a range of about 5 to about 7.

[0345] Isolated: The term “isolated” means altered or removed from the natural state. For example, a nucleic acid or a peptide naturally present in a living animal is not “isolated,” but the same nucleic acid or peptide partially or completely separated from the coexisting materials of its natural state is “isolated.” An isolated nucleic acid or protein can exist in substantially purified form, or can exist in a non-native environment such as, for example, a host cell.

[0346] Lipid: As used herein, the terms “lipid” and “lipid-like material” are broadly defined as molecules which comprise one or more hydrophobic moieties or groups and optionally also one or more hydrophilic moieties or groups. Molecules comprising hydrophobic moieties and hydrophilic moieties are also typically denoted as amphiphiles.

[0347] RNA lipid nanoparticle: As used herein, the term “RNA lipid nanoparticle” refers to a nanoparticle comprising at least one lipid and RNA molecule(s), e.g., one or more polyribonucleotides as provided herein. In some embodiments, an RNA lipid nanoparticle comprises at least one cationic amino lipid. In some embodiments, an RNA lipid nanoparticle comprises at least one cationic amino lipid, at least one helper lipid, and at least one polymer-conjugated lipid (e.g., PEG-conjugated lipid). In various embodiments, RNA lipid nanoparticles as described herein can have an average size (e.g., Z-average) of about 100 nm to 1000 nm, or about 200 nm to 900 nm, or about 200 nm to 800 nm, or about 250 nm to about 700 nm. In some embodiments of the present disclosure, RNA lipid nanoparticles can have a particle size (e.g., Z-average) of about 30 nm to about 200 nm, or about 30 nm to about 150 nm, about 40 nm to about 150 nm, about 50 nm to about 150 nm, about 60 nm to about 130 nm, about 70 nm to about 110 nm, about 70 nm to about 100 nm, about 80 nm to about 100 nm, about 90 nm to about 100 nm, about 70 to about 90 nm, about 80 nm to about 90 nm, or about 70 nm to about 80 nm. In some embodiments, an average size of lipid nanoparticles is determined by measuring the average particle diameter. In some embodiments, RNA lipid nanoparticles may be prepared by mixing lipids with RNA molecules described herein.

[0348] Neutralization: As used herein, the term “neutralization” refers to an event in which binding agents such as antibodies bind to a biological active site of a virus such as a receptor binding protein, thereby inhibiting the parasitic infection of cells. In some embodiments, the term “neutralization” refers to an event in which binding agents eliminate or significantly reduce ability of infecting cells.

[0349] Nucleic acid/Polynucleotide: As used herein, the term “nucleic acid” refers to a polymer of at least 10 nucleotides or more. In some embodiments, a nucleic acid is or comprises DNA. In some embodiments, a nucleic acid is or comprises RNA. In some embodiments, a nucleic acid is or comprises peptide nucleic acid (PNA). In some embodiments, a nucleic acid is or comprises a single stranded nucleic acid. In some embodiments, a nucleic acid is or comprises a double-stranded nucleic acid. In some embodiments, a nucleic acid comprises both single and double-stranded portions. In some embodiments, a nucleic acid comprises a backbone that comprises one or more phosphodiester linkages. In some embodiments, a nucleic acid comprises a backbone that comprises both phosphodiester and non-phosphodiester linkages. For example, in some embodiments, a nucleic acid may comprise a backbone that comprises one or more phosphorothioate or 5′-N-phosphoramidite linkages and/or one or more peptide bonds, e.g., as in a “peptide nucleic acid”. In some embodiments, a nucleic acid comprises one or more, or all, natural residues (e.g., adenine, cytosine, deoxyadenosine, deoxycytidine, deoxyguanosine, deoxythymidine, guanine, thymine, uracil). In some embodiments, a nucleic acid comprises on or more, or all, non-natural residues. In some embodiments, a non-natural residue comprises a nucleoside analog (e.g., 2-aminoadenosine, 2-thiothymidine, inosine, pyrrolo-pyrimidine, 3-methyl adenosine, 5-methylcytidine, C-5 propynyl-cytidine, C-5 propynyl-uridine, 2-aminoadenosine, C5-bromouridine, C5-fluorouridine, C5-iodouridine, C5-propynyl-uridine, C5-propynyl-cytidine, C5-methylcytidine, 2-aminoadenosine, 7-deazaadenosine, 7-deazaguanosine, 8-oxoadenosine, 8-oxoguanosine, 6-O-methylguanine, 2-thiocytidine, methylated bases, intercalated bases, and combinations thereof). In some embodiments, a non-natural residue comprises one or more modified sugars (e.g., 2′-fluororibose, ribose, 2′-deoxyribose, arabinose, and hexose) as compared to those in natural residues. In some embodiments, a nucleic acid has a nucleotide sequence that encodes a functional gene product such as an RNA or polypeptide. In some embodiments, a nucleic acid has a nucleotide sequence that comprises one or more introns. In some embodiments, a nucleic acid may be prepared by isolation from a natural source, enzymatic synthesis (e.g., by polymerization based on a complementary template, e.g., in vivo or in vitro), reproduction in a recombinant cell or system, or chemical synthesis. In some embodiments, a nucleic acid is at least 3, 4, 5, 6, 7, 8, 9, 10, 15, 20, 25, 30, 35, 40, 45, 50, 55, 60, 65, 70, 75, 80, 85, 90, 95, 100, 110, 120, 130, 140, 150, 160, 170, 180, 190, 20, 225, 250, 275, 300, 325, 350, 375, 400, 425, 450, 475, 500, 600, 700, 800, 900, 1000, 1500, 2000, 2500, 3000, 3500, 4000, 4500, 5000, 5500, 6000, 6500, 7000, 7500, 8000, 8500, 9000, 9500, 10,000, 10,500, 11,000, 11,500, 12,000, 12,500, 13,000, 13,500, 14,000, 14,500, 15,000, 15,500, 16,000, 16,500, 17,000, 17,500, 18,000, 18,500, 19,000, 19,500, or 20,000 or more residues or nucleotides long.

[0350] Pharmaceutically effective amount: The term “pharmaceutically effective amount” or “therapeutically effective amount” refers to the amount which achieves a desired reaction or a desired effect alone or together with further doses. In the case of the treatment of a particular disease (e.g., HIV), a desired reaction in some embodiments relates to inhibition of the course of the disease (e.g., HIV). In some embodiments, such inhibition may comprise slowing down the progress of a disease (e.g., HIV) and/or interrupting or reversing the progress of the disease (e.g., HIV). In some embodiments, a desired reaction in a treatment of a disease (e.g., HIV) may be or comprise delay or prevention of the onset of a disease (e.g., HIV) or a condition (e.g., an HIV associated condition). An effective amount of a composition (e.g., a pharmaceutical composition) described herein will depend, for example, on disease (e.g., HIV) or a condition (e.g., an HIV associated condition) to be treated, the severity of such a disease (e.g., HIV) or a condition (e.g., an HIV associated condition), individual parameters of the patient, including, e.g., age, physiological condition, size and weight, the duration of treatment, the type of an accompanying therapy (if present), the specific route of administration and similar factors. Accordingly, doses of a composition (e.g., a pharmaceutical composition) described herein may depend on various of such parameters. In the case that a reaction in a patient is insufficient with an initial dose, higher doses (or effectively higher doses achieved by a different, more localized route of administration) may be used.

[0351] Polypeptide: As used herein, the term “polypeptide” refers to a polymeric chain of amino acids. In some embodiments, a polypeptide has an amino acid sequence that occurs in nature. In some embodiments, a polypeptide has an amino acid sequence that does not occur in nature. In some embodiments, a polypeptide has an amino acid sequence that is engineered in that it is designed and/or produced through action of the hand of man. In some embodiments, a polypeptide may comprise or consist of natural amino acids, non-natural amino acids, or both. In some embodiments, a polypeptide may comprise or consist of only natural amino acids or only non-natural amino acids. In some embodiments, a polypeptide may comprise D-amino acids, L-amino acids, or both. In some embodiments, a polypeptide may comprise only D-amino acids. In some embodiments, a polypeptide may comprise only L-amino acids. In some embodiments, a polypeptide may include one or more pendant groups or other modifications, e.g., modifying or attached to one or more amino acid side chains, at the polypeptide's N-terminus, at the polypeptide's C-terminus, or any combination thereof. In some embodiments, such pendant groups or modifications comprise acetylation, amidation, lipidation, methylation, pegylation, etc., including combinations thereof. In some embodiments, a polypeptide may be cyclic, and/or may comprise a cyclic portion. In some embodiments, a polypeptide is not cyclic and/or does not comprise any cyclic portion. In some embodiments, a polypeptide is linear. In some embodiments, a polypeptide may be or comprise a stapled polypeptide. In some embodiments, the term “polypeptide” may be appended to a name of a reference polypeptide, activity, or structure; in such instances it is used herein to refer to polypeptides that share the relevant activity or structure and thus can be considered to be members of the same class or family of polypeptides. For each such class, the present specification provides and/or those skilled in the art will be aware of exemplary polypeptides within the class whose amino acid sequences and/or functions are known; in some embodiments, such exemplary polypeptides are reference polypeptides for the polypeptide class or family. In some embodiments, a member of a polypeptide class or family shows significant sequence homology or identity with, shares a common sequence motif (e.g., a characteristic sequence element) with, and/or shares a common activity (in some embodiments at a comparable level or within a designated range) with a reference polypeptide of the class; in some embodiments with all polypeptides within the class). For example, in some embodiments, a member polypeptide shows an overall degree of sequence homology or identity with a reference polypeptide that is at least about 30-40%, and is often greater than about 50%, 60%, 70%, 80%, 90%, 91%, 92%, 93%, 94%, 95%, 96%, 97%, 98%, 99% or more and/or includes at least one region (e.g., a conserved region that may in some embodiments be or comprise a characteristic sequence element) that shows very high sequence identity, often greater than 90% or even 95%, 96%, 97%, 98%, or 99%. Such a conserved region usually encompasses at least 3-4 and often up to 35 or more amino acids; in some embodiments, a conserved region encompasses at least one stretch of at least 2, 3, 4, 5, 6, 7, 8, 9, 10, 11, 12, 13, 14, 15, 16, 17, 18, 19, 20, 21, 22, 23, 24, 25, 26, 27, 28, 29, 30, 31, 32, 33, 34, 35 or more contiguous amino acids. In some embodiments, a relevant polypeptide may comprise or consist of a fragment of a parent polypeptide.

[0352] Prevent: As used herein, the term “prevent” or “prevention” when used in connection with the occurrence of a disease, disorder, and/or condition, refers to reducing the risk of developing the disease, disorder and/or condition and/or to delaying onset of one or more characteristics or symptoms of the disease, disorder or condition. Prevention may be considered complete when onset of a disease, disorder or condition has been delayed for a predefined period of time.

[0353] Reference: As used herein, the term “reference” describes a standard or control relative to which a comparison is performed. For example, in some embodiments, an agent, animal, individual, population, sample, sequence or value of interest is compared with a reference or control agent, animal, individual, population, sample, sequence or value. In some embodiments, a reference or control is tested and/or determined substantially simultaneously with the testing or determination of interest. In some embodiments, a reference or control is a historical reference or control, optionally embodied in a tangible medium. Typically, as would be understood by those skilled in the art, a reference or control is determined or characterized under comparable conditions or circumstances to those under assessment. Those skilled in the art will appreciate when sufficient similarities are present to justify reliance on and/or comparison to a particular possible reference or control.

[0354] Ribonucleic acid (RNA) or Polyribonucleotide: As used herein, the term “ribonucleic acid,” “RNA,” or “polyribonucleotide” refers to a polymer of ribonucleotides. In some embodiments, an RNA is single stranded. In some embodiments, an RNA is double stranded. In some embodiments, an RNA comprises both single and double stranded portions. In some embodiments, an RNA can comprise a backbone structure as described in the definition of “Nucleic acid/Polynucleotide” above. An RNA can be a regulatory RNA (e.g., siRNA, microRNA, etc.), or a messenger RNA (mRNA). In some embodiments, an RNA is a mRNA. In some embodiments, where an RNA is a mRNA, a RNA typically comprises at its 3′ end a poly(A) region. In some embodiments, where an RNA is a mRNA, an RNA typically comprises at its 5′ end an art-recognized cap structure, e.g., for recognizing and attachment of a mRNA to a ribosome to initiate translation. In some embodiments, a RNA is a synthetic RNA. Synthetic RNAs include RNAs that are synthesized in vitro (e.g., by enzymatic synthesis methods and/or by chemical synthesis methods).

[0355] Ribonucleotide: As used herein, the term “ribonucleotide” encompasses unmodified ribonucleotides and modified ribonucleotides. For example, unmodified ribonucleotides include the purine bases adenine (A) and guanine (G), and the pyrimidine bases cytosine (C) and uracil (U). Modified ribonucleotides may include one or more modifications including, but not limited to, for example, (a) end modifications, e.g., 5′ end modifications (e.g., phosphorylation, dephosphorylation, conjugation, inverted linkages, etc.), 3′ end modifications (e.g., conjugation, inverted linkages, etc.), (b) base modifications, e.g., replacement with modified bases, stabilizing bases, destabilizing bases, or bases that base pair with an expanded repertoire of partners, or conjugated bases, (c) sugar modifications (e.g., at the 2′ position or 4′ position) or replacement of the sugar, and (d) internucleoside linkage modifications, including modification or replacement of the phosphodiester linkages. The term “ribonucleotide” also encompasses ribonucleotide triphosphates including modified and non-modified ribonucleotide triphosphates.

[0356] Risk: As will be understood from context, “risk” of a disease, disorder, and/or condition refers to a likelihood that a particular individual will develop the disease, disorder, and/or condition. In some embodiments, risk is expressed as a percentage. In some embodiments, risk is expressed as a risk relative to a risk associated with a reference sample or group of reference samples. In some embodiments, a reference sample or group of reference samples have a known risk of a disease, disorder, condition and/or event. In some embodiments, a reference sample or group of reference samples are from individuals comparable to a particular individual. In some embodiments, risk may reflect one or more genetic attributes, e.g., which may predispose an individual toward development (or not) of a particular disease, disorder and/or condition. In some embodiments, risk may reflect one or more epigenetic events or attributes and/or one or more lifestyle or environmental events or attributes.

[0357] Selective or specific: The term “selective” or “specific,” when used herein in reference to an agent having an activity, is understood by those skilled in the art to mean that the agent discriminates between potential target entities, states, or cells. For example, in some embodiments, an agent is said to bind “specifically” to its target if it binds preferentially with that target in the presence of one or more competing alternative targets. In many embodiments, specific interaction is dependent upon the presence of a particular structural feature of the target entity (e.g., an epitope, a cleft, a binding site). It is to be understood that specificity need not be absolute. In some embodiments, specificity may be evaluated relative to that of a target-binding moiety for one or more other potential target entities (e.g., competitors). In some embodiments, specificity is evaluated relative to that of a reference specific binding moiety. In some embodiments, specificity is evaluated relative to that of a reference non-specific binding moiety.

[0358] Substituted or optionally substituted: As described herein, compounds of the invention may contain “optionally substituted” moieties. In general, the term “substituted,” whether preceded by the term “optionally” or not, means that one or more hydrogens of the designated moiety are replaced with a suitable substituent. “Substituted” applies to one or more hydrogens that are either explicit or implicit from the structure (e.g.,

[chemical structure]

refers to at least

[chemical structure]

refers to at least

[chemical structure]

Unless otherwise indicated, an “optionally substituted” group may have a suitable substituent at each substitutable position of the group, and when more than one position in any given structure may be substituted with more than one substituent selected from a specified group, the substituent may be either the same or different at every position. Combinations of substituents envisioned by this invention are preferably those that result in the formation of stable or chemically feasible compounds. The term “stable,” as used herein, refers to compounds that are not substantially altered when subjected to conditions to allow for their production, detection, and, in certain embodiments, their recovery, purification, and use for one or more of the purposes provided herein. Groups described as being “substituted” preferably have between 1 and 4 substituents, more preferably 1 or 2 substituents. Groups described as being “optionally substituted” may be unsubstituted or be “substituted” as described above.

[0359] Suitable monovalent substituents on a substitutable carbon atom of an “optionally substituted” group are independently halogen; —(CH₂)₀₋₄R^{∘}; —(CH₂)₀₋₄OR^{∘}; —O(CH₂)₀₋₄R^{∘}, —O—(CH₂)₀₋₄C(O)OR^{∘}; —(CH₂)₀₋₄CH(OR^{∘})₂; —(CH₂)₀₋₄SR^{∘}; —(CH₂)₀₋₄Ph, which may be substituted with R^{∘}; —(CH₂)₀₋₄O(CH₂)₀₋₁Ph which may be substituted with R^{∘}; —CH═CHPh, which may be substituted with R^{∘}; —(CH₂)₀₋₄O(CH₂)₀₋₁-pyridyl which may be substituted with R^{∘}; —NO₂; —CN; —N₃; —(CH₂)₀₋₄N(R^{∘})₂; —(CH₂)₀₋₄N(R^{∘})C(O)R^{∘}; —N(R^{∘})C(S)R^{∘}; —(CH₂)_{0- 4}N(R^{∘})C(O)NR^{∘}₂; —N(R^{∘})C(S)NR^{∘}₂; —(CH₂)₀₋₄N(R^{∘})C(O)OR^{∘}; —N(R^{∘})N(R^{∘})C(O)R^{∘}; —N(R^{∘})N(R^{∘})C(O)NR^{∘}₂; —N(R^{∘})N(R^{∘})C(O)OR^{∘}; —(CH₂)₀₋₄C(O)R^{∘}; C(S)R^{∘}; —(CH₂)₀₋₄C(O)OR^{∘}; —(CH₂)₀₋₄C(O)SR^{∘}; —(CH₂)₀₋₄C(O)OSiR^{∘}₃; —(CH₂)₀₋₄OC(O)R^{∘}; —OC(O)(CH₂)₀₋₄SR^{∘}; —(CH₂)₀₋₄SC(O)R^{∘}; —(CH₂)₀₋₄C(O)NR^{∘}₂; —C(S)NR^{∘}₂; —C(S)SR^{∘}; —SC(S)SR^{∘}, —(CH₂)₀₋₄OC(O)NR^{∘}₂; —C(O)N(OR^{∘})R^{∘}; —C(O)C(O)R^{∘}; —C(O)CH₂C(O)R^{∘}; —C(NOR^{∘})R^{∘}; —(CH₂)₀₋₄SSR^{∘}; —(CH₂)₀₋₄S(O)₂R^{∘}; —(CH₂)₀₋₄S(O)₂OR^{∘}; —(CH₂)₀₋₄OS(O)₂R^{∘}; —S(O)₂NR^{∘}₂; —(CH₂)₀₋₄S(O)R^{∘}; —N(R^{∘}S(O)₂NR^{∘}₂; —N(R^{∘}S(O)₂R^{∘}; —N(OR^{∘})R^{∘}; —C(NH)NR^{∘}₂; —P(O)₂R^{∘}; —P(O)R^{∘}₂; —OP(O)R^{∘}₂; —OP(O)(OR^{∘})₂; SiR^{∘}₃; —(C₁₋₄ straight or branched alkylene)O—N(R^{∘})₂; or —(C₁₋₄ straight or branched alkylene)C(O)O—N(R^{∘})₂, wherein each R^{∘} may be substituted as defined below and is independently hydrogen, C₁₋₆ aliphatic, —CH₂Ph, —O(CH₂)₀₋₁Ph, —CH₂-(5- to 6-membered heteroaryl ring), or a 3- to 6-membered saturated, partially unsaturated, or aryl ring having 0-4 heteroatoms independently selected from nitrogen, oxygen, or sulfur, or, notwithstanding the definition above, two independent occurrences of R^{∘}, taken together with their intervening atom(s), form a 3- to 12-membered saturated, partially unsaturated, or aryl mono- or bicyclic ring having 0-4 heteroatoms independently selected from nitrogen, oxygen, or sulfur, which may be substituted as defined below.

[0360] Suitable monovalent substituents on R^{∘} (or the ring formed by taking two independent occurrences of R^{∘} together with their intervening atoms), are independently halogen, —(CH₂)₀₋₂R^{I}, -(haloR^{I}), —(CH₂)₀₋₂OH, —(CH₂)₀₋₂OR^{I}, —(CH₂)₀₋₂CH(OR^{I})₂, —O(haloR^{I}), —CN, —N₃, —(CH₂)₀₋₂C(O)R^{I}, —(CH₂)₀₋₂C(O)OH, —(CH₂)₀₋₂C(O)OR^{I}, —(CH₂)₀₋₂SR^{I}, —(CH₂)₀₋₂SH, —(CH₂)₀₋₂NH₂, —(CH₂)₀₋₂NHR^{I}, —(CH₂)₀₋₂NR^{I}₂, —NO₂, —SiR^{I}₃, —OSiR^{I}₃, —C(O)SR^{I}, —(C₁₋₄ straight or branched alkylene)C(O)OR^{I}, or —SSR^{I} wherein each R^{I} is unsubstituted or where preceded by “halo” is substituted only with one or more halogens, and is independently selected from C₁₋₄ aliphatic, —CH₂Ph, —O(CH₂)₀₋₁Ph, or a 3- to 6-membered saturated, partially unsaturated, or aryl ring having 0-4 heteroatoms independently selected from nitrogen, oxygen, or sulfur. Suitable divalent substituents on a saturated carbon atom of R^{∘} include ═O and ═S.

[0361] Suitable divalent substituents on a saturated carbon atom of an “optionally substituted” group include the following: ═O (“oxo”), ═S, ═NNR*₂, ═NNHC(O)R*, ═NNHC(O)OR*, ═NNHS(O)₂R*, ═NR*, ═NOR*, —O(C(R*₂))₂₋₃O—, or —S(C(R*₂))₂₋₃S—, wherein each independent occurrence of R* is selected from hydrogen, C₁₋₆ aliphatic which may be substituted as defined below, or an unsubstituted 5- to 6-membered saturated, partially unsaturated, or aryl ring having 0-4 heteroatoms independently selected from nitrogen, oxygen, or sulfur. Suitable divalent substituents that are bound to vicinal substitutable carbons of an “optionally substituted” group include: —O(CR*₂)₂₋₃O—, wherein each independent occurrence of R* is selected from hydrogen, C₁₋₆ aliphatic which may be substituted as defined below, or an unsubstituted 5-6-membered saturated, partially unsaturated, or aryl ring having 0-4 heteroatoms independently selected from nitrogen, oxygen, or sulfur.

[0362] Suitable substituents on the aliphatic group of R* include halogen, —R^{I}, -(haloR^{I}), —OH, —OR^{I}, —O(haloR^{I}), —CN, —C(O)OH, —C(O)OR^{I}, —NH₂, —NHR^{I}, —NR^{I}₂, or —NO₂, wherein each R^{I} is unsubstituted or where preceded by “halo” is substituted only with one or more halogens, and is independently C₁₋₄ aliphatic, —CH₂Ph, —O(CH₂)₀₋₁Ph, or a 3- to 6-membered saturated, partially unsaturated, or aryl ring having 0-4 heteroatoms independently selected from nitrogen, oxygen, or sulfur.

[0363] Suitable substituents on a substitutable nitrogen of an “optionally substituted” group include —R^{†}, —NR^{†}₂, —C(O)R^{†}, —C(O)OR^{†}, —C(O)C(O)R^{†}, —C(O)CH₂C(O)R^{†}, —S(O)₂R^{†}, —S(O)₂NR^{†}₂, —C(S)NR^{†}₂, —C(NH)NR^{†}₂, or —N(R^{†})S(O)₂R^{†}; wherein each R^{†} is independently hydrogen, C₁₋₆ aliphatic which may be substituted as defined below, unsubstituted —OPh, or an unsubstituted 3- to 6-membered saturated, partially unsaturated, or aryl ring having 0-4 heteroatoms independently selected from nitrogen, oxygen, or sulfur, or, notwithstanding the definition above, two independent occurrences of R^{†}, taken together with their intervening atom(s) form an unsubstituted 3- to 12-membered saturated, partially unsaturated, or aryl mono- or bicyclic ring having 0-4 heteroatoms independently selected from nitrogen, oxygen, or sulfur.

[0364] Suitable substituents on the aliphatic group of R^{†} are independently halogen, —R^{I}, -(haloR^{I}), —OH, —OR^{I}, —O(haloR^{I}), —CN, —C(O)OH, —C(O)OR^{I}, —NH₂, —NHR^{I}, —NR^{I}₂, or —NO₂, wherein each R^{I} is unsubstituted or where preceded by “halo” is substituted only with one or more halogens, and is independently C₁₋₄ aliphatic, —CH₂Ph, —O(CH₂)₀₋₁Ph, or a 3- to 6-membered saturated, partially unsaturated, or aryl ring having 0-4 heteroatoms independently selected from nitrogen, oxygen, or sulfur.

[0365] Subject: As used herein, the term “subject” refers to an organism to be administered with a composition described herein, e.g., for experimental, diagnostic, prophylactic, and/or therapeutic purposes. Typical subjects include animals (e.g., mammals such as mice, rats, rabbits, non-human primates, domestic pets, etc.) and humans. In some embodiments, a subject is a human subject. In some embodiments, a subject is suffering from a disease, disorder, or condition (e.g., HIV, an HIV-associated condition, etc.). In some embodiments, a subject is susceptible to a disease, disorder, or condition (e.g., HIV, an HIV-associated condition, etc.). In some embodiments, a subject displays one or more symptoms or characteristics of a disease, disorder, or condition (e.g., HIV, an HIV-associated condition, etc.). In some embodiments, a subject displays one or more non-specific symptoms of a disease, disorder, or condition (e.g., HIV, an HIV-associated condition, etc.). In some embodiments, a subject does not display any symptom or characteristic of a disease, disorder, or condition (e.g., HIV, an HIV-associated condition, etc.). In some embodiments, a subject is someone with one or more features characteristic of susceptibility to or risk of a disease, disorder, or condition (e.g., HIV, an HIV-associated condition, etc.). In some embodiments, a subject is a patient. In some embodiments, a subject is an individual to whom diagnosis and/or therapy is and/or has been administered.

[0366] Suffering from: An individual who is “suffering from” a disease, disorder, and/or condition (e.g., HIV, an HIV-associated condition, etc.) has been diagnosed with and/or displays one or more symptoms of a disease, disorder, and/or condition.

[0367] Susceptible to: An individual who is “susceptible to” a disease, disorder, and/or condition (e.g., HIV, an HIV-associated condition, etc.) is one who has a higher risk of developing the disease, disorder, and/or condition (e.g., HIV, an HIV-associated condition, etc.) than does a member of the general public. In some embodiments, an individual who is susceptible to a disease, disorder and/or condition (e.g., HIV, an HIV-associated condition, etc.) may not have been diagnosed with the disease, disorder, and/or condition (e.g., HIV, an HIV-associated condition, etc.). In some embodiments, an individual who is susceptible to a disease, disorder, and/or condition (e.g., HIV, an HIV-associated condition, etc.) may exhibit symptoms of the disease, disorder, and/or condition (e.g., HIV, an HIV-associated condition, etc.). In some embodiments, an individual who is susceptible to a disease, disorder, and/or condition (e.g., HIV, an HIV-associated condition, etc.) may not exhibit symptoms of the disease, disorder, and/or condition (e.g., HIV, an HIV-associated condition, etc.). In some embodiments, an individual who is susceptible to a disease, disorder, and/or condition (e.g., HIV, an HIV-associated condition, etc.) will develop the disease, disorder, and/or condition (e.g., HIV, an HIV-associated condition, etc.). In some embodiments, an individual who is susceptible to a disease, disorder, and/or condition (e.g., HIV, an HIV-associated condition, etc.) will not develop the disease, disorder, and/or condition (e.g., HIV, an HIV-associated condition, etc.).

[0368] Therapy: The term “therapy” refers to an administration or delivery of an agent or intervention that has a therapeutic effect and/or elicits a desired biological and/or pharmacological effect (e.g., has been demonstrated to be statistically likely to have such effect when administered to a relevant population). In some embodiments, a therapeutic agent or therapy is any substance that can be used to alleviate, ameliorate, relieve, inhibit, prevent, delay onset of, reduce severity of, and/or reduce incidence of one or more symptoms or features of a disease, disorder, and/or condition (e.g., HIV, an HIV-associated condition, etc.). In some embodiments, a therapeutic agent or therapy is a medical intervention (e.g., surgery, radiation, phototherapy) that can be performed to alleviate, relieve, inhibit, present, delay onset of, reduce severity of, and/or reduce incidence of one or more symptoms or features of a disease, disorder, and/or condition.

[0369] Treat: As used herein, the term “treat,” “treatment,” or “treating” refers to any method used to partially or completely alleviate, ameliorate, relieve, inhibit, prevent, delay onset of, reduce severity of, and/or reduce incidence of one or more symptoms or features of a disease, disorder, and/or condition (e.g., HIV, an HIV-associated condition, etc.). Treatment may be administered to a subject who does not exhibit signs of a disease, disorder, and/or condition (e.g., HIV, an HIV-associated condition, etc.). In some embodiments, treatment may be administered to a subject who exhibits only early signs of the disease, disorder, and/or condition (e.g., HIV, an HIV-associated condition, etc.), for example for the purpose of decreasing the risk of developing pathology associated with the disease, disorder, and/or condition. In some embodiments, treatment may be administered to a subject at a later-stage of disease, disorder, and/or condition (e.g., HIV, an HIV-associated condition, etc.).

### DETAILED DESCRIPTION OF CERTAIN EMBODIMENTS

### I. Human Immunodeficiency Virus (HIV)

[0370] Human Immunodeficiency Virus (HIV) is a lentivirus within the family Retroviridae. A mature HIV particle is generally round in shape and approximately 100 nm in diameter. It is composed of (from innermost to outermost) a core comprising of two identical single-stranded RNA molecules, a capsid, and an envelope (FIG. 1B) (Musumeci et al., Molecules 20.9 (2015): 17511-17532 which is herein incorporated by reference). The envelope is composed of a lipid bilayer and Env proteins. These Env proteins exist as trimers of gp120 surface protein anchored in the envelope membrane through a gp41 transmembrane protein. The viral capsid, surrounded by the envelope, comprises a symmetrical outer capsid membrane, which is made up of matrix protein p17. Within the outer capsid membrane is the conical capsid comprised of inner capsid protein p24. The inner capsid is attached to the outer capsid membrane at its tapered cone. The inner capsid contains the viral RNA (two identical copies) and viral enzymes: reverse transcriptase, integrase, and protease. Also contained with the viral particle are oligopeptides generated by proteolytic processing of Gag and Gag/Pol precursor proteins p55 and p160 that occurs during the maturation of the viral particle (GAC, Transfusion Medicine Hemotherapy, 43:203-222, 2016, which is herein incorporated by reference).

[0371] There are two main types of HIV, HIV-1 and HIV-2. HIV-1 is the most common type of HIV and accounts for 95% of all infections worldwide. HIV-2 is relatively uncommon and less infectious. HIV-2 is mainly concentrated in West Africa and the surrounding countries.

[0372] HIV-1 and HIV-2 have many similarities including their intracellular replication pathways, transmission modes and clinical effects leading to acquired immune deficiency syndrome (AIDS). However, HIV-2 is less likely to progress into AIDS because of its lower transmissibility. Thus, individuals infected by HIV-2 generally do not see disease progression for a long period of time, while patients infected by HIV-1 progress faster and tend to contract AIDS.

[0373] Once progression begins, however, the pathological process for both viruses is largely similar. One difference is that HIV-2 is found to progress at higher CD4 counts. Additionally, HIV-2 infections are characterized by lower viral loads of over 10,000 copies/mL compared to millions of copies/mL of HIV-1. A subject's immune response tends to be more protective in the case of HIV-2 infection, thus slowing down disease progression.

[0374] HIV-1 and HIV-2 are, in turn, further divided into groups and subtypes. HIV-1 is divided into main or M group, outlier or O group and non-M/O or N group. The most common group is group M, which is mostly responsible for the HIV epidemic worldwide. The other groups are relatively uncommon and are seen in select geographies including Gabon, Cameroon and Equatorial Guinea.

[0375] Group M is still further divided into genetically distinct subtypes: A, B, C, D, F, G, H, J and K. Some of these subtypes combine to form a hybrid virus called “circulating recombinant form.” Globally, subtype B accounts for 12% of HIV infections. Subtype B is the dominant HIV-1 subtype found in the Americas, Australasia, and Western Europe. As a result, most of the clinical research on HIV to date is focused on these populations.

[0376] Although subtype C represents almost 50% of all HIV affected individuals, less research has focused on this subtype. Subtype C is commonly found in countries in Southern Africa, where the incidence of HIV is very high. Cameroon and the Democratic Republic of Congo, the region of origin of HIV-1, have great diversity of HIV-1 subtypes. However, the pattern of subtype distribution across the globe is changing now, due to population mixing and migration.

[0377] There are about eight HIV-2 subtypes identified to date. The two main subtypes of HIV-2 that are considered epidemic are A and B. HIV-2 group A infections are mostly seen in West Africa, though a few cases have been reported in Brazil, Europe, US and India. HIV-2 group B infections have only been seen in West Africa.

[0378] Because HIV subtypes can be geographically diverse, ideal therapeutics are able to target and neutralize more than one subtype, and even more preferably, multiple strains of HIV. As discussed further below, anti-HIV antibodies capable of binding to and at least temporarily neutralizing HIV virions have been developed. Nonetheless, issues persist with such anti-HIV antibodies, including challenges with administration, antibody persistence in vivo, and viral escape. Polyribonucleotides and compositions of the present disclosure address these challenges, as described herein.

### A. HIV Genome

[0379] HIV contains two identical copies of single-stranded DNA encoding its genome. When the virus integrates into a host cell, reverse transcription of the viral RNA into double stranded DNA occurs, which leads to degradation of the RNA and integration of the double stranded DNA, or proviral DNA, into the host genome. The HIV genome is flanked at both ends by an LTR (long terminal repeat) region, including a 5′ LTR encoding a transcriptional promotor. The RNA genome is 9749 nucleotides and comprises a 5′ cap, a 3′ poly(A) tail, and several open reading frames ORFs (Wain-Hobson et al., Cell 40(1):9-17, 1985, which is herein incorporated by reference).

[0380] The HIV genome includes the following genes: gag, pol, vif, vpr, tat, rev, vpu, env, and nef (see FIG. 1A). The proteins encoded by gag, pol, and env are viral structural proteins. The proteins encoded by tat and rev are essential regulatory proteins. The proteins encoded by nef, vpr, vif, and vpu are accessory regulatory proteins. The gag gene encodes a P555Gag precursor protein of proteins of the outer core membrane (p17), the capsid protein (p24), the nucleoprotein (p7), Pr55Gag, and p6 protein. Protein p24 forms the conical capsid and protein p17 forms the inner membrane layer. Protein p6 is involved in viral particle release.

[0381] The pol gene encodes Pr160GagPol precursor protein, protease enzyme p10, reverse transcriptase (p51), and RNase H (p15) or both together as p66 protein, and integrase p32. Pr160GagPol is the precursor of the viral enzymes p10, p51, and p15. Proteolytic cleavage of Gag (Pr55) and Gag-Pol (Pr160GagPol) results in protease p10. Protein p51 reverse transcriptase is responsible for transcription of HIV RNA into proviral DNA. Protein p55 (RNAse H) functions to degrade viral RNA in the viral RNA/DNA complex when proviral DNA is generated. Protein p32 integrase functions in integrating proviral DNA into a host cell genome.

[0382] The env gene encodes precursor protein PrGp160 of two envelope glycoproteins gp120 (surface protein) and gp41 (transmembrane protein). Proteins gp120 and gp41 are generated by protease cleavage of precursor protein PrGp160. Protein gp120 functions in the attachment of the virus to a target host cell. Protein gp41 anchors gp120 into the viral membrane and functions to fuse the viral and target cell membrane.

[0383] The gene tat encodes Tat protein p14 (transactivator protein), which activates transcription of viral genes. The rev gene encodes Rev protein p19 (RNA splicing-regulator), which regulates export of mRNA (both non-spliced and partially spliced). The nef gene encodes Nef protein p27 (negative regulating factor), which functions in HIV replication and enhances the infectivity of the virus in a host cell. Protein p27 also functions to downregulate CD4 and HLA on target cells. The vif gene encodes Vif protein p23 (viral infectivity factor), which functions in the production of the virus in a host cell. The gene vpr encodes Vpr protein p15 (virus protein r). This protein interacts with p6 protein and facilitates infectivity of the virus in a host cell. The gene vpu encodes Vpu protein p16 (virus protein unique), which allows for efficient release of the viral particle and controls CD4 degradation on a target cell. Protein p16 also controls intracellular signaling. The gene vpx encodes Vpx protein p15 (virus protein x), which functions to interact with p6 protein and is important in the early phases of viral replication. The gene tev encodes Tat/Rev protein p26, which is a fusion protein that regulates Tat and Rev proteins (GAC, Transfusion Medicine Hemotherapy, 43:203-222, 2016, which is herein incorporated by reference).

### B. Lifecycle

[0384] The lifecycle of HIV involves HIV virion entry into a target host cell, reverse transcription of the viral genome, integration into the host genome, and protein maturation. To initiate infection, an HIV particle comes into contact with a target host cell. Surface glycoprotein env gp120 of a mature HIV particle binds to a CD4 receptor on the target host cell, which initiates the additional binding of gp120 to a co-receptor, i.e., chemokine receptor 5 (CCR5) or chemokine receptor 4 (CXCR4 of fusin). Binding of gp120 to CD4 and the co-receptor triggers a conformational change of gp120 so that gp41 is presented on the viral membrane and can fuse with the plasma membrane of the target host cell. The viral capsid then enters the cytoplasm of the host cell. The capsid is taken up by an endosome releases its contents, i.e., the viral RNA. Upon entry and release of the virus into the target host cell, the virus undergoes reverse transcription, where the viral RNA is reverse transcribed into single stranded cDNA. The RNA strand is then degraded by RNase H, and the single stranded cDNA is converted to double stranded DNA by DNA-dependent DNA polymerase activity by the reverse transcriptase enzyme.

[0385] The double-stranded DNA, or proviral DNA, forms a complex with integrase and is transported into the nucleus of the host cell, and inserts itself at random into the host cell genome. Once integrated into the genome, the proviral genome is replicated. The proviral genome can be replicated with the host cell genome as part of cell division or can replicate using its own machinery. For example, the LTR promotor creates an attachment site for cellular DNA-dependent RNA polymerases and transcription factors to initiate transcription. Transcription of proviral DNA is accelerated by the Tat protein.

[0386] The process of entry into a target host cell, reverse transcription, integration and protein maturation can be completed in less than 24 hours, and progeny viral particles have been detected within 12 hours of infection. The first progeny viral particles after infection may be released from the infected cells about 24 hours after infection. Infected T cells are typically eliminated at a rate of 2-4 days by the immune system (e.g., by cytotoxic T cells). As HIV infected T cells are destroyed and production of T cells is limited, there is a decline in T helper cells. The proteins nef and tat also inhibit maturation and replacement of helper T cells. As a result, an HIV infection over time will result in immunodeficiency (GAC, Transfusion Medicine Hemotherapy, 43:203-222, 2016, which is herein incorporated by reference).

### C. Transmission and Pathology

[0387] HIV enters the body through intact mucous membranes, injured skin or by parenteral inoculation. HIV is most commonly transmitted sexually. Upon infection, HIV can be detected throughout the body by about 10-14 days, and transmission via blood or transplanted organs is possible after about 5-6 days post infection. Clinical symptoms typically manifest after 3-6 weeks post infection and can include fever, lymph node enlargement, fatigue, rash, gastrointestinal symptoms, acute neuropathy, myalgias and/or malaise. However, during this acute phase some individuals are asymptomatic. These symptoms of the acute or primary infection can persist for 2-6 weeks. This initial symptomatic phase is then typically followed by an asymptomatic phase or one with occasional symptoms, which can last several years.

[0388] Left untreated, HIV infection causes progressive CD4+ T cell loss, which can lead to a suite of immunological abnormalities and an increased risk of infectious and oncological complications. Additionally, HIV infection also implicates cardiovascular disease, bone disease, renal and hepatic dysfunction, and several other common morbidities.

[0389] Although antiviral therapies (ART) have been developed to treat HIV infection, ART can only prevent new cells from becoming infected, i.e., ART cannot eliminate infection if a cell already contains viral DNA integrated into its genome. Additionally, HIV establishes a latent infection in CD4+ T cells that can be maintained indefinitely, some having the capability of self-renewal. HIV may continue to reinitiate replication in a cell once it is integrated into its genome. (Deeks et al. Nature reviews 1.1 2015 and GAC, Transfusion Medicine Hemotherapy, 43:203-222, 2016 which are herein incorporated by reference).

### D. Therapeutic Strategies

[0390] Development of therapeutics targeting HIV face many challenges. One challenging factor is the heterogeneity of the virus. HIV can be divided into at least two major types (HIV-1, found worldwide, and HIV-2, found largely in west Africa), while HIV-1 has been further subdivided into three subgroups (M, N, O and P), and M has been still further subdivided into subtypes A-L. Subtypes are also able to recombine upon co-infection, resulting in yet further recombinant subtypes.

[0391] Another challenging factor is that the high mutation rate of HIV in vivo. A recent study quantified the HIV-1 genome-wide rate of spontaneous mutation in DNA sequences from peripheral blood mononuclear cells and revealed an extremely high mutation rate of (4.1±1.7)×10⁻³ per base per cell, which is the highest rate reported for any biological entity (Cuevas et al, PloS Biol 2015, which is herein incorporated by reference). The ability to identify and develop a therapeutic targeting a conserved epitope across the multiple groups and subtypes of a continuously mutating HIV sequence is therefore extremely challenging, and the virus has a unique ability to evade the immune system.

[0392] Aside from the high mutational frequency, HIV presents other challenges for the immune system that make it uniquely challenging to treat. Therapeutic targets on HIV include the HIV envelop protein (HIV Env), however, the HIV Env is heavily glycosylated and the Env sites are therefore shielded from a therapeutic by the glycans present. Additionally, Env glycans are derived from the host and can be extremely heterogeneous.

[0393] A recent therapeutic strategy involves use of broadly neutralizing antibodies (bNAbs), which are antibodies that can neutralize a diversity of global HIV isolates. Such antibodies have been identified from individuals infected by HIV considered to be “Elite Neutralizers,” making up <10% of HIV patients (Burton and Hangartner, Ann. Rev. Immunol. 2016, which is herein incorporated by reference). Such antibodies provide insights for potential target epitopes and structures of therapeutics. Other advances to aid the advance of therapeutics include the generation of a stable HIV Env spike trimer (Sanders and Moore, Immunol. Rev. 2017, which is herein incorporated by reference) and characterization of its structure at high resolution (Ward and Wilson, Immunol. Rev. 2017, which is herein incorporated by reference). Examples of Env sites that are potential targets include the apex site, the high-mannose patch of the gp120 region, the gp120-gp41 interface region, the gp41 membrane proximal region (MPER), and the CD4 binding site (see FIG. 2, from McCoy and Burton, Immunol Rev. 275.1 11-20 2017, which is herein incorporated by reference). These sites each face unique challenges as a therapeutic target for bNAbs. For examples, bNAbs that target the gp41-gp120 interface must be able bind to complex heterogeneous glycans. BNAbs that target the CD4 binding site of the Env protein have been found to show high levels of somatic hypermutation.

[0394] Nonetheless, among these sites, the CD4bs is of particular interest because CD4 serves as a primary receptor for viral entry. Certain CD4bs bNAbs are characterized by the usage of immunoglobulin heavy chain gene segment IGVH1-2*02, high levels of somatic hypermutation, a five-residue complementarity-determining region 3 of the light chain (LCDR3), and mimicry of the Env-CD4 interaction. Other CD4bs bNAbs are characterized by the usage of immunoglobulin heavy chain gene segment IGVH1-46 (e.g., IGVH1-46*01) and can have longer LCDR3s.

[0395] The present disclosure provides, among other things, polyribonucleotides that encode antibody agents, e.g., bNAbs, that target a broader group of HIV variants, and as such and are able to treat a greater number of HIV patients. Additionally, the present disclosure provides compositions for the delivery of polyribonucleotides that encode antibody agents, e.g., bNAbs, targeting various HIV sequences.

### 1. Anti-Viral Treatments for HIV

[0396] HIV infection is currently, primarily treated with antiretroviral therapy (ART). ART is a type of drug that can reduce HIV multiplication, increase CD4 cell count, and reduce transmission risk in an infected individual. The World Health Organization (WHO) recommends that ART be initiated in all adults infected with HIV regardless of clinical stage or CD4 cell count (Consolidated guidelines on HIV prevention, testing, treatment, service delivery and monitoring: recommendations for a public health approach. Geneva: World Health Organization; 2021, which is herein incorporated by reference). However, ART is not a curative therapy, and viremia (e.g., viral load) will quickly rebound if an infected individual stops taking ART. The high mutation rate of HIV also constrains patient in having a strict observance with their therapy to avoid the emergence of escape mutants and treatment failure. Thus, ART is intended to be taken every day for the entirety of an infected subject's life.

[0397] There are several classes of FDA-approved ART to treat HIV that act via different mechanisms. Effective management of HIV infection often involves combinations of at least 3 ARTs to treat the complex pathogenicity of the disease. The most effective combination of ARTs is often different between infected individuals (see, for example, Bhatti et al., Cureus 2016, which is herein incorporated by reference). Cihlar et al., Current opinion in virology, 2016, hereby incorporated by reference in its entirety, reviews the classes of ART drugs for the treatment of HIV.

TABLE 1
Exemplary classes of ART used to treat HIV, mechanisms
of action, and exemplary compounds in each class

| ART Class | Mechanism of Action | Examples |
|---|---|---|
| CCR5 Antagonist | Inhibits HIV entry into cell by | Maraviroc |
| | blocking CCR5 and viral | |
| | interaction | |
| Fusion Inhibitors | Inhibits HIV envelope from | Enfuvirtide |
| | merging with host cell membrane | |
| Integrase Strand Transfer Inhibitor | Inhibits integration of viral DNA | Bictegravir, Dolutegravir, |
| (INSTI) | into host genome by blocking | Elvitegravir, Raltegravir |
| | integrase enzyme | |
| Non-Nucleoside Reverse | Inhibits HIV replication by | Delavirdine, Doravirine, Efavirenz, |
| Transcriptase Inhibitors (NNRTI) | blocking reverse transcriptase | Etravirine, Nevirapine, Rilpivirine, |
| | enzyme to suppress conversion of | |
| | RNA into DNA | |
| Nucleoside Reverse Transcriptase | Inhibits HIV replication by | Abacavir, Emtricitabine, |
| Inhibitors (NRTI) | blocking reverse transcriptase | Lamivudine, Tenofovir, Zidovudine |
| | enzyme to suppress conversion of | |
| | RNA into DNA | |
| Post-Attachment Inhibitor | Inhibits HIV entry into cell after | Ibalizumab |
| | binding has occurred | |
| Protease Inhibitors | Inhibits HIV particle development | Atazanavir, Darunavir, |
| | and maturity by blocking protease | Fosamprenavir, Lopinavir, |
| | enzyme | Nelfinavir, Ritonavir, Tipranavir |

### 2. HIV Antibody Agents

[0398] In addition to ART, anti-HIV antibodies have been developed. Using anti-HIV antibodies for treating HIV generally requires antibodies having specific characteristics, including safety, a favorable pharmacokinetic profile, highly potent neutralizing activity, and broad neutralizing activity to effectively target the diversity present in HIV virions. As with other HIV therapeutics (including, e.g., ART), viral escape from anti-HIV antibodies present as significant challenge.

[0399] For example, Barouch, et al. infected rhesus macaques with SHIV-SF162P3 (Barouch, et al., Nature 503:7475 224-228, 2013), which is incorporated herein by reference in its entirety. The rhesus macaques were then treated with 3 monoclonal antibodies (mAbs): N332 glycan-dependent mAb PGT121 and CD4 binding site-specific mAbs 3BNC117 and b12. mAbs were administered as a cocktail on days 0 and 7 at 10 mg/kg each, as a cocktail on day 0 alone at 10 mg/kg each or as a combination of just PGT121 and 3BNC117 at 10 mg/kg each. Transient viral suppression was observed until bNAbs level dropped below 10 μg/mL. mAbs were also singly administered to macaques, and PGT121 alone resulted in rapid virologic control which rebounded after 6-8 weeks in most animals. The macaques that received a combination of PGT121 and 3BNC117 were given a second dose on day 105, after viral levels had rebounded. Viral re-suppression was observed, although the control was less durable than the previous administration.

[0400] Shingai, et al. describes rhesus macaques were infected with SHIV_{AD8EO} (Shingai, et al., Nature 503:7475 277-280, 2013, which is incorporated herein by reference in its entirety). The rhesus macaques were then treated with 10-1074 and 3BNC117 mAbs singly or in combination. When administered singly at 12 weeks post inoculation at 10 mg/kg, both antibodies caused rapid viral suppression, but virus levels quickly rebounded. Administration of both antibodies in combination to chronically infected animals resulted in longer periods of suppression and increased CD4+ T cell levels, although viral levels did rebound later. In other studies, both antibodies were singly pre-treated to macaques and were found to prevent virus acquisition. Single genome analysis of rebounded virus in 10-074 treated macaques revealed mutations that eliminated the gp120 N332 glycan, rendering resistance to the mAb. However, SGA analysis of rebounded virus in macaques treated with both 10-074 and 3BNC117 revealed that not all of the macaques contained virus with changes that imparted mAb resistance.

[0401] Caskey, et al. describe a first-in-human dose escalation phase 1 clinical trial of 3BNC117 (CD4 binding site antibody) (Caskey, et al., Nature 522.7557:487-491, 2015, which is incorporated herein by reference in its entirety). Uninfected and HIV-1-infected individuals were enrolled in the trial. 1, 3, 10, or 30 mg/kg doses of 3BNC117 were found to be generally safe and well tolerated; no grade 3, 4, or serious adverse events were observed. HIV-1-infected individuals were observed to have a quicker clearance rate of the antibody than uninfected control subjects. The effect of the treatment on viral load was dose-dependent; 10 and 30 mg/kg doses decreased viral load by up to 2.5 log. Viral resistance was observed to develop in some individuals regardless of mAb dose, but not in other individuals. Viruses were cloned and sequenced, G459D was a commonly observed mutation in the 10 mg/kg group, others showed a longer V5 loop (other mutations described). Both mutations can alter sensitivity to anti-CD4bs.

[0402] Caskey, et al. also assessed 10-074, which is a highly potent mAb that targets the V3 loop of the HIV-1 envelope spike (Caskey et al., Nature Medicine 23.2:185-191, 2017), which is incorporated herein by reference in its entirety. An open label phase 1 first-in-human clinical trial was performed with 14 uninfected and 19 HIV-1-infected individuals. A single intravenous infusion was administered at 3, 10, or 30 mg/kg. The mAb was found to be generally safe and well-tolerated; no grade 3, 4, or serious adverse events were observed. HIV-1-infected individuals were observed to have a quicker clearance rate of the antibody than uninfected controls. Treatment suppressed viral load in individuals with 10-074 sensitive strains, followed by rebound. Single genome sequencing (SGS) of rebounded virus revealed all patients that responded to treatment displayed a PNGS at position N332 and an intact ³²⁴G(D/N)IR³²⁷ motif. Four weeks after infusion, 91% of envelope sequences contained amino acid mutations, 97% of which eliminated the PNGS at position 332 by mutating either N332 or S334. 3% of mutated sequences showed changes at D/N325 in the ³²⁴G(D/N)IR³²⁷ motif. Majority of mutations at nucleic acid level were transitions, consistent with reverse transcriptase errors. Neutralization assay testing showed that mutated HIV-1 resistant to 10-074 was not resistant to 3BNC117, VRC01, or PGDM1400 (mAbs targeting other regions of HIV-1). SGS performed 1 week after infusion revealed that resistant variants are pre-existing or rapidly generated.

[0403] Bar, et al. performed two open-lab trials, which were conducted on the safety, side-effect profile, pharmacokinetic properties, and antiviral activity of VRC01 (bNAb targeting CD4-binding site of HIV) in patients undergoing interruption of antiretroviral therapy (ART) (Bar et al., New England Journal of Medicine 375.21:2037-2050, 2016, which is incorporated herein by reference in its entirety). In one trial, 40 mg/kg was infused 3 times over a 6 week period, and in the other trial, 40 mg/kg was infused 8 times over a 6 month period. Treatment was well tolerated, no grade 3 or higher adverse events were observed. Neither trial produced durable suppression of plasma viremia, although a slight increase in time to rebound was found relative to historical controls. Regardless of time to rebound, resistance to VRC01 increased almost universally in participants in one trial. Viral isolates showed greater resistance to VRC01 neutralization in pre-treated samples versus post-treated. Treatment with VRC01 did not impact the susceptibility to neutralization with other bNAbs.

[0404] Mendoza, et al. performed a phase 1b clinical trial assessing the combination of 3BNC117 and 10-1074, which were infused at 30 mg/kg dose on weeks 0, 3, and 6 (Mendoza, et al., Nature 561.7724:479-484, 2018, which is incorporated herein by reference in its entirety). These two bNAbs target independent sites on HIV-1 envelope spike. Infusions were generally found to be safe and well tolerated with no reported serious adverse events. Median time to rebound was significantly extended with combination bNAb treatment. Two earliest rebounder individuals were found to previously harbor strains resistant to one or the other bNAb. Rebounded virus clustered within low diversity lineages consistent with expansion of 1-2 recrudescent viruses (escape). Most rebounded virus was found to contain 10-1074 mutations as compared to 3BNC117 mutations. However, combination bNAb therapy proved more effective at containing viral escape than single bNAb treatment.

[0405] Gautam, et al. assayed rhesus macaques that were infected with SHIV_{AD8EO} and treated with 3BNC117-LS and 10-074-LS mAbs (Gautam, Rajeev, et al., Nature Medicine 24.5: 610-616, 2018, which is incorporated herein by reference in its entirety). M428L and N343S (collectively referred to as LS) are mutations in the fragment domains of the mAbs to increase half-life. The LS mutations had no effect on virus neutralization in in vitro assays. LS mAbs were administered singly at 20 mg/kg, and were well tolerated in all monkeys. 10-1074-LS recipients demonstrated increased protection from virus acquisition than 3BNC117-LS recipients, but LS mutations in both antibodies were more effective than WT. 10-1074-LS decayed at a slower rate than 3BNC117-LS in serum. mAb concentration/neutralization activity were determined to be predictive of the probability of infection. Only experiments in which antibody pre-treatment followed by virus challenge were performed.

[0406] Schommers, et al. characterized an anti-HIV antibody, referred to as “1-18,” in in vitro assays, as well as HIV-1 infected humanized mice. 1-18 was reported to bind to the CD4 binding site of HIV and have strong potency and breadth against HIV strains. Schommers reported that 1-18 had certain characteristics previously found in other anti-HIV antibodies, which seemed to contribute to 1-18's potency and breadth: (1) 1-18 has an aromatic residue that mimics residue Phe43 of CD4 to target the “Phe43gp120 pocket,” a characteristic previously reported for the anti-HIV antibody, N6; (2) 1-18 contacts with the adjacent gp120 protomer, as previously observed with the anti-HIV antibody, 3BNC117, but with increased buried surface area (via its six-residue insertion in CDRH1); and (3) a larger buried surface area on gp120 than other the anti-HIV antibodies. In addition, 1-18 was reported to contact conserved residues on HIV gp120 that other anti-HIV antibodies did not contact. Schommers hypothesized that these contacts may allow 1-18 to rely less on classical CD4 binding site contacts, which may make viral escape more difficult. Nonetheless, Schommers observed that a small number of HIV strains was found to be 1-18 resistant.

[0407] Together, the above data suggest that administration of antibodies can be effective for treating or preventing HIV. However, the difficulties with targeting such a mutable virus are evident from the studies above, as well as studies showing that (1) when a single broadly neutralizing antibody (bNAb) was used for therapy, HIV resistance to the therapy developed within a few weeks (Bar et al., Effect of HIV Antibody VRC01 on Viral Rebound after Treatment Interruption, N. Engl. J. Med. 375, 2037-2050 (2016); Caskey et al., Viraemia suppressed in HIV-1-infected humans by broadly neutralizing antibody 3BNC117. Nature 522, 487-491 (2015); Caskey et al., Antibody 10-1074 suppresses viremia in HIV-1-infected individuals. Nat. Med. 23, 185-191 (2017); Klein et al., HIV therapy by a combination of broadly neutralizing antibodies in humanized mice, Nature 492, 118-122 (2012); Lynch et al., Virologic effects of broadly neutralizing antibody VRC01 administration during chronic HIV-1 infection, Sci. Transl. Med. 7, 319ra206 (2015); Scheid et al., HIV-1 antibody 3BNC117 suppresses viral rebound in humans during treatment interruption, Nature 535, 556-560 (2016), each of which is herein incorporated by reference in its entirety), and (2) certain antibody combinations resulted in improved viral control by preventing early development of resistance (Bar-On et al., Safety and antiviral activity of combination HIV-1 broadly neutralizing antibodies in viremic individuals, Nat. Med. 24, 1701-1707 (2018); Klein et al., 2012; Mendoza et al., Combination therapy with anti-HIV-1 antibodies maintains viral suppression, Nature 561, 479-484 (2018), each of which is herein incorporated by reference in its entirety). The viral rebound observed with some of these antibodies suggests that the antibodies may only be effective for a limited time, e.g., prior to HIV escape mutations developing.

[0408] Accordingly, treatments and prophylactic therapeutics that can avoid viral escape and remain effective for HIV neutralization are still needed. As discussed herein, the present disclosure provides technologies useful for administering polyribonucleotides encoding one or more antibody agents, e.g., anti-HIV antibody agents, to a subject. Use of the technologies and approaches described herein allows for, e.g., simultaneous production of different antibody agents from polyribonucleotides. The formats of antibody agents have been designed to minimize or eliminate the risk of immunoglobulin chain mispairing. Being able to combine multiple antibody agent formulations as described herein (e.g., including an 1-18 antibody agent) allows for the development of a composition (e.g., a pharmaceutical composition) that delivers multiple antibody agents together so that they can bind different epitopes of the HIV virus, thereby minimizing viral escape through mutations and increasing overall efficacy.

### II. Polyribonucleotides for Delivery of Antibody Agents

[0409] The present disclosure, among other things, utilizes RNA technologies as a modality to express antibody agents directly in a subject as a novel class of antibody-based therapeutics. In some embodiments, a polyribonucleotide as described herein encodes an immunoglobulin chain of an antibody agent.

[0410] In some embodiments, an antibody agent targets HIV. In some embodiments, an antibody agent targeting HIV specifically binds to particular epitope of an HIV polypeptide. For example, in some embodiments, an antibody agent specifically binds to an epitope encompassing the CD4 binding site or a portion thereof. See FIG. 2, from McCoy and Burton, Immunol Rev. 275.1 11-20, 2017, which is herein incorporated by reference.

[0411] In some embodiments, an antibody agent may have a binding affinity (e.g., as measured by a dissociation constant) for an HIV epitope (e.g., an epitope of the CD4 binding site) of at least about 10⁻⁴M, at least about 10⁻⁵M, at least about 10⁻⁶M, at least about 10⁻⁷M, at least about 10⁻⁸M, at least about 10⁻⁹M, or lower. In some embodiments, an HIV antibody agent selectively binds a target epitope of HIV such that binding between the HIV antibody agent and the target epitope is greater than 2-fold, greater than 5-fold, greater than 10-fold, or greater than 100-fold as compared with binding of the HIV antibody agent to a non-target epitope. In some embodiments, an HIV antibody agent may have binding affinity for an HIV epitope and also variants of said HIV epitope. Those skilled in the art will appreciate that, in some cases, binding affinity (e.g., as measured by a dissociation constant) may be influenced by non-covalent intermolecular interactions such as hydrogen bonding, electrostatic interactions, hydrophobic and Van der Waals forces between the two molecules. Alternatively or additionally, binding affinity between a ligand and its target molecule may be affected by the presence of other molecules. Those skilled in the art will be familiar with a variety of technologies for measuring binding affinity and/or dissociation constants in accordance with the present disclosure, including, e.g., but not limited to ELISAs, gel-shift assays, pull-down assays, equilibrium dialysis, analytical ultracentrifugation, surface plasmon resonance (SPR), bio-layer interferometry, grating-coupled interferometry, and spectroscopic assays.

[0412] In some embodiments, an antibody agent targeting HIV may comprise or be derived from a broadly neutralizing antibody (bNAb). In some embodiments, an antibody agent targeting HIV may be any one of the HIV-targeting antibodies described in Barouch, et al., Nature 503: 7475 224-228, 2013, Shingai, et al., Nature 503: 7475 277-280, 2013, Caskey, et al., Nature 522.7557:487-491, 2015, Caskey et al., Nature Medicine 23.2: 185-191, 2017, Bar et al., New England Journal of Medicine 375.21:2037-2050, 2016, Mendoza, et al., Nature 561.7724: 479-484, 2018, Gautam, Rajeev, et al., Nature Medicine 24.5: 610-616, 2018, the contents of each of which are incorporated herein by reference in their entirety for the purposes described herein.

[0413] In some embodiments, an antibody agent targeting HIV may be e.g., 1-18, PGT121, 3BNC117, b12, 10-1074, 10E8, 10E8v4, VRC01, VRC07-523-L/S, PGDM1400, fragments thereof, or combinations thereof. Exemplary anti-HIV antibodies that can be used in compositions described herein include, but are not limited to, 1-18, PGT121, 3BNC117, b12, 10-1074, 10E8, 10E8v4, VRC01, VRC07-523-L/S, PGDM1400, fragments thereof, or combinations thereof. For example, in some embodiments, a polyribonucleotide as described herein can comprise one or more heavy chain complementarity determining regions (HCDRs) (e.g., HCDR1, HCDR2, and/or HCDR3) from 1-18, PGT121, 3BNC117, b12, 10-1074, 10E8, 10E8v4, VRC01, VRC07-523-L/S, or PGDM1400. In some embodiments, a polyribonucleotide as described herein can comprise HCDR1, HCDR2, and HCDR3 from 1-18, PGT121, 3BNC117, b12, 10-1074, 10E8, 10E8v4, VRC01, VRC07-523-L/S, or PGDM1400. In some embodiments, a polyribonucleotide as described herein can comprise a heavy chain variable domain from 1-18, PGT121, 3BNC117, b12, 10-1074, 10E8, 10E8v4, VRC01, VRC07-523-L/S, or PGDM1400. In some embodiments, a polyribonucleotide as described herein can comprise one or more light chain complementarity determining regions (LCDRs) (e.g., LCDR1, LCDR2, and/or LCDR3) from 1-18, PGT121, 3BNC117, b12, 10-1074, 10E8, 10E8v4, VRC01, VRC07-523-L/S, or PGDM1400. In some embodiments, a polyribonucleotide as described herein can comprise LCDR1, LCDR2, and LCDR3 from 1-18, PGT121, 3BNC117, b12, 10-1074, 10E8, 10E8v4, VRC01, VRC07-523-L/S, or PGDM1400. In some embodiments, a polyribonucleotide as described herein can comprise a light chain variable domain from 1-18, PGT121, 3BNC117, b12, 10-1074, 10E8, 10E8v4, VRC01, VRC07-523-L/S, or PGDM1400.

[0414] In some embodiments, a plurality of polyribonucleotides that each encode an immunoglobulin chain of an antibody agent can be used to deliver (e.g., by administration to a subject) two or more antibody agents (e.g., 1-18, PGT121, 3BNC117, b12, 10-1074, 10E8, 10E8v4, VRC01, VRC07-523-L/S, or PGDM1400, or fragments or variants thereof). In some embodiments, a plurality of polyribonucleotides that each encode an immunoglobulin chain of an antibody agent can be used to deliver (e.g., by administration to a subject) three or more antibody agents (e.g., 1-18, PGT121, 3BNC117, b12, 10-1074, 10E8, 10E8v4, VRC01, VRC07-523-L/S, or PGDM1400, or fragments or variants thereof). In some embodiments, a plurality of polyribonucleotides that each encode an immunoglobulin chain of an antibody agent can be used to deliver (e.g., by administration to a subject) four or more antibody agents (e.g., 1-18, PGT121, 3BNC117, b12, 10-1074, 10E8, 10E8v4, VRC01, VRC07-523-L/S, or PGDM1400, or fragments or variants thereof). In some embodiments, a plurality of polyribonucleotides that each encode an immunoglobulin chain of an antibody agent can be used to deliver (e.g., by administration to a subject) two, three, four, five or six antibody agents (e.g., 1-18, PGT121, 3BNC117, b12, 10-1074, 10E8, 10E8v4, VRC01, VRC07-523-L/S, or PGDM1400, or fragments or variants thereof).

[0415] In some embodiments, an antibody agent encoded by one or more polyribonucleotides described herein includes all or part of a 1-18 antibody. In some embodiments, an antibody agent encoded by one or more polyribonucleotides provided herein includes all or part of a 1-18 antibody. In some embodiments, an antibody agent comprises a heavy chain variable domain comprising: (i) HCDR1 (DDPYTDDDTFTKYW; SEQ ID NO: 6); (ii) HCDR2 (ISPHFARP; SEQ ID NO: 9); (iii) HCDR3 (ARDPFGDRAPHYNYHMDV; SEQ ID NO: 12); or (iv) a combination thereof. In some embodiments, an antibody agent comprises a heavy chain variable domain comprising: (i) HCDR1 (DDPYTDDDTFTKYW; SEQ ID NO: 6); (ii) HCDR2 (ISPHFARP; SEQ ID NO: 9); and (iii) HCDR3 (ARDPFGDRAPHYNYHMDV; SEQ ID NO: 12). In some embodiments, an antibody agent comprises a light chain variable domain comprising: (i) LCDR1 (QGLDSSH; SEQ ID NO: 15); (ii) LCDR2 (GTS; SEQ ID NO: 18); (iii) LCDR3 (QRYGGTPIT; SEQ ID NO: 21); or (iv) a combination thereof. In some embodiments, an antibody agent comprises a light chain variable domain comprising: (i) LCDR1 (QGLDSSH; SEQ ID NO: 15); (ii) LCDR2 (GTS; SEQ ID NO: 18); and (iii) LCDR3 (QRYGGTPIT; SEQ ID NO: 21). In some embodiments, an antibody agent comprises (a) a heavy chain variable domain comprising: (i) HCDR1 (DDPYTDDDTFTKYW; SEQ ID NO: 6); (ii) HCDR2 (ISPHFARP; SEQ ID NO: 9); (iii) HCDR3 (ARDPFGDRAPHYNYHMDV; SEQ ID NO: 12); or (iv) a combination thereof; and (b) a light chain variable domain comprising: (i) LCDR1 (QGLDSSH; SEQ ID NO: 15); (ii) LCDR2 (GTS; SEQ ID NO: 18); (iii) LCDR3 (QRYGGTPIT; SEQ ID NO: 21); or (iv) a combination thereof. In some embodiments, an antibody agent comprises (a) a heavy chain variable domain comprising: (i) HCDR1 (DDPYTDDDTFTKYW; SEQ ID NO: 6); (ii) HCDR2 (ISPHFARP; SEQ ID NO: 9); and (iii) HCDR3 (ARDPFGDRAPHYNYHMDV; SEQ ID NO: 12); and (b) a light chain variable domain comprising: (i) LCDR1 (QGLDSSH; SEQ ID NO: 15); (ii) LCDR2 (GTS; SEQ ID NO: 18); and (iii) LCDR3 (QRYGGTPIT; SEQ ID NO: 21).

[0416] In some embodiments, a polyribonucleotide described herein encodes all or part of a 1-18 antibody. In some embodiments, a polyribonucleotide described herein encodes an immunoglobulin chain comprising a heavy chain variable domain, wherein the heavy chain variable domain comprises: (i) HCDR1 (DDPYTDDDTFTKYW; SEQ ID NO: 6); (ii) HCDR2 (ISPHFARP; SEQ ID NO: 9); (iii) HCDR3 (ARDPFGDRAPHYNYHMDV; SEQ ID NO: 12); or (iv) a combination thereof. In some embodiments, a polyribonucleotide described herein encodes an immunoglobulin chain comprising a heavy chain variable domain, wherein the heavy chain variable domain comprises: (i) HCDR1 (DDPYTDDDTFTKYW; SEQ ID NO: 6); (ii) HCDR2 (ISPHFARP; SEQ ID NO: 9); and (iii) HCDR3 (ARDPFGDRAPHYNYHMDV; SEQ ID NO: 12). In some embodiments, a polyribonucleotide described herein encodes an immunoglobulin chain comprising a light chain variable domain, wherein the light chain variable domain comprises: (i) LCDR1 (QGLDSSH; SEQ ID NO: 15); (ii) LCDR2 (GTS; SEQ ID NO: 18); (iii) LCDR3 (QRYGGTPIT; SEQ ID NO: 21); or (iv) a combination thereof. In some embodiments, a polyribonucleotide described herein encodes an immunoglobulin chain comprising a light chain variable domain, wherein the light chain variable domain comprises: (i) LCDR1 (QGLDSSH; SEQ ID NO: 15); (ii) LCDR2 (GTS; SEQ ID NO: 18); and (iii) LCDR3 (QRYGGTPIT; SEQ ID NO: 21). In some embodiments, a polyribonucleotide described herein encodes an immunoglobulin chain comprising a heavy chain variable domain and a light chain variable domain, wherein the heavy chain variable domain comprises: (i) HCDR1 (DDPYTDDDTFTKYW; SEQ ID NO: 6); (ii) HCDR2 (ISPHFARP; SEQ ID NO: 9); (iii) HCDR3 (ARDPFGDRAPHYNYHMDV; SEQ ID NO: 12); or (iv) a combination thereof; and the light chain variable domain comprises: (i) LCDR1 (QGLDSSH; SEQ ID NO: 15); (ii) LCDR2 (GTS; SEQ ID NO: 18); (iii) LCDR3 (QRYGGTPIT; SEQ ID NO: 21); or (iv) a combination thereof. In some embodiments, a polyribonucleotide described herein encodes an immunoglobulin chain comprising a heavy chain variable domain and a light chain variable domain, wherein the heavy chain variable domain comprises: (i) HCDR1 (DDPYTDDDTFTKYW; SEQ ID NO: 6); (ii) HCDR2 (ISPHFARP; SEQ ID NO: 9); and (iii) HCDR3 (ARDPFGDRAPHYNYHMDV; SEQ ID NO: 12); and the light chain variable domain comprises: (i) LCDR1 (QGLDSSH; SEQ ID NO: 15); (ii) LCDR2 (GTS; SEQ ID NO: 18); and (iii) LCDR3 (QRYGGTPIT; SEQ ID NO: 21). In some embodiments, a polyribonucleotide described herein encodes two immunoglobulin chains: a first immunoglobulin chain comprising a heavy chain variable domain, wherein the heavy chain variable domain comprises: (i) HCDR1 (DDPYTDDDTFTKYW; SEQ ID NO: 6); (ii) HCDR2 (ISPHFARP; SEQ ID NO: 9); (iii) HCDR3 (ARDPFGDRAPHYNYHMDV; SEQ ID NO: 12); or (iv) a combination thereof; and a second immunoglobulin chain comprising a light chain variable domain, wherein the light chain variable domain comprises: (i) LCDR1 (QGLDSSH; SEQ ID NO: 15); (ii) LCDR2 (GTS; SEQ ID NO: 18); (iii) LCDR3 (QRYGGTPIT; SEQ ID NO: 21); or (iv) a combination thereof. In some embodiments, a polyribonucleotide described herein encodes two immunoglobulin chains: a first immunoglobulin chain comprising a heavy chain variable domain, wherein the heavy chain variable domain comprises: (i) HCDR1 (DDPYTDDDTFTKYW; SEQ ID NO: 6); (ii) HCDR2 (ISPHFARP; SEQ ID NO: 9); and (iii) HCDR3 (ARDPFGDRAPHYNYHMDV; SEQ ID NO: 12); and a second immunoglobulin chain comprising a light chain variable domain, wherein the light chain variable domain comprises: (i) LCDR1 (QGLDSSH; SEQ ID NO: 15); (ii) LCDR2 (GTS; SEQ ID NO: 18); and (iii) LCDR3 (QRYGGTPIT; SEQ ID NO: 21).

[0417] In some embodiments, an antibody agent encoded by one or more polyribonucleotides provided herein comprises a heavy chain variable domain having at least 80%, 85%, 90%, 91%, 92%, 93%, 94%, 95%, 96%, 97%, 98%, or 99% sequence identity to an amino acid sequence represented by SEQ ID NO: 24. In some embodiments, an antibody agent encoded by one or more polyribonucleotides provided herein comprises a light chain variable domain having at least 80%, 85%, 90%, 91%, 92%, 93%, 94%, 95%, 96%, 97%, 98%, or 99% identity to an amino acid sequence represented by SEQ ID NO: 29. In some embodiments, an antibody agent comprises a heavy chain variable domain represented by SEQ ID NO: 24. In some embodiments, an antibody agent comprises a light chain variable domain represented by SEQ ID NO: 29.

[0418] In some embodiments, a polyribonucleotide described herein encodes an immunoglobulin chain comprising a heavy chain variable domain having at least 80%, 85%, 90%, 91%, 92%, 93%, 94%, 95%, 96%, 97%, 98%, or 99% sequence identity to an amino acid sequence represented by SEQ ID NO: 24. In some embodiments, a polyribonucleotide described herein encodes an immunoglobulin chain comprising a light chain variable domain having at least 80%, 85%, 90%, 91%, 92%, 93%, 94%, 95%, 96%, 97%, 98%, or 99% sequence identity to an amino acid sequence represented by SEQ ID NO: 29. In some embodiments, a polyribonucleotide described herein encodes an immunoglobulin chain comprising a heavy chain variable domain and a light chain variable domain, wherein the heavy chain variable domain has at least 80%, 85%, 90%, 91%, 92%, 93%, 94%, 95%, 96%, 97%, 98%, or 99% sequence identity to an amino acid sequence represented by SEQ ID NO: 24, and wherein the light chain variable domain has at least 80%, 85%, 90%, 91%, 92%, 93%, 94%, 95%, 96%, 97%, 98%, or 99% sequence identity to an amino acid sequence represented by SEQ ID NO: 29.

[0419] In some embodiments, a polyribonucleotide as described herein encodes an immunoglobulin chain of an antibody agent, where the immunoglobulin chain comprises a heavy chain variable (VH) domain. In some embodiments, a VH domain comprises a VH domain of a 1-18 antibody. In some embodiments, a polyribonucleotide encodes a VH domain of an antibody selected from: PGT121, 3BNC117, b12, 10-1074, 10-1074-LS, 10E8, VRC01, VRC07-523, or PGDM1400 (e.g., as described herein).

[0420] In some embodiments, a polyribonucleotide comprises a VH domain encoding sequence that comprises (a) an HCDR1-encoding sequence that comprises a ribonucleic acid sequence according to SEQ ID NO: 7; (b) an HCDR2-encoding sequence that comprises a ribonucleic acid sequence according to SEQ ID NO: 10; (c) an HCDR3-encoding sequence that comprises a ribonucleic acid sequence according to SEQ ID NO: 13, or (d) a combination thereof. In some embodiments, a polyribonucleotide comprises a VH domain encoding sequence that comprises (a) an HCDR1-encoding sequence that comprises a ribonucleic acid sequence according to SEQ ID NO: 7; (b) an HCDR2-encoding sequence that comprises a ribonucleic acid sequence according to SEQ ID NO: 10; and (c) an HCDR3-encoding sequence that comprises a ribonucleic acid sequence according to SEQ ID NO: 13. In some embodiments, a polyribonucleotide encodes a VH domain, and comprises a VH-encoding sequence that is at least 90%, 91%, 92%, 93%, 94%, 95%, 96%, 97%, 98%, or 99% to identical to SEQ ID NO: 25 or 27. In some embodiments, a polyribonucleotide encodes a VH domain, and comprises a VH-encoding sequence according to SEQ ID NO: 25 or 27.

[0421] In some embodiments, a polyribonucleotide as described herein comprises an immunoglobulin chain of an antibody agent, where the immunoglobulin chain comprises a light chain variable (VL) domain. In some embodiments, a VL domain comprises the VL domain of a 1-18 antibody. In some embodiments, a polyribonucleotide encodes a VL domain of an antibody selected from: PGT121, 3BNC117, b12, 10-1074, 10-1074-LS, 10E8, VRC01, VRC07-523, or PGDM1400 (e.g., as described herein).

[0422] In some embodiments, a polyribonucleotide comprises one or more coding regions that encode an immunoglobulin chain of an antibody agent, where the immunoglobulin chain comprises a light chain variable (VL) domain. In some embodiments, a polyribonucleotide comprises a VL domain encoding sequence that comprises (a) an LCDR1-encoding sequence that comprises a ribonucleic acid sequence according to SEQ ID NO: 16; (b) an LCDR2-encoding sequence that comprises a ribonucleic acid sequence according to SEQ ID NO: 19 (GGCACCAGC); (c) an LCDR3-encoding sequence that comprises a ribonucleic acid sequence according to SEQ ID NO: 22; or (d) a combination thereof. In some embodiments, a polyribonucleotide comprises a VL domain encoding sequence that comprises (a) an LCDR1-encoding sequence that comprises a ribonucleic acid sequence according to SEQ ID NO: 16; (b) an LCDR2-encoding sequence that comprises a ribonucleic acid sequence according to SEQ ID NO: 19 (GGCACCAGC); and (c) an LCDR3-encoding sequence that comprises a ribonucleic acid sequence according to SEQ ID NO: 22. In some embodiments, a polyribonucleotide encodes a VL domain, and comprises a VL-encoding sequence that is at least 90%, 91%, 92%, 93%, 94%, 95%, 96%, 97%, 98%, or 99% identical to SEQ ID NO: 30. In some embodiments, a polyribonucleotide encodes a VL domain, and comprises a VL-encoding sequence according to SEQ ID NO: 30.

[0423] In some embodiments, an antibody agent is formed by one, two, three, or four immunoglobulin chains.

[0424] In some embodiments, a polyribonucleotide as described herein encodes a single immunoglobulin chain. In some embodiments, a first polyribonucleotide encodes a first immunoglobulin chain of an antibody agent. In some embodiments, a first polyribonucleotide encodes a first immunoglobulin chain of an antibody agent and a second polyribonucleotide encodes a second immunoglobulin chain of the antibody agent. In some embodiments, a first polyribonucleotide encodes a first immunoglobulin chain of an antibody agent, a second polyribonucleotide encodes a second immunoglobulin chain of the antibody agent, and a third polyribonucleotide encodes a third immunoglobulin chain of the antibody agent. In some embodiments, a first polyribonucleotide encodes a first immunoglobulin chain of an antibody agent, a second polyribonucleotide encodes a second immunoglobulin chain of the antibody agent, a third polyribonucleotide encodes a third immunoglobulin chain of the antibody agent, and a fourth polyribonucleotide encodes a fourth immunoglobulin chain of the antibody agent.

[0425] In some embodiments, a polyribonucleotide as described herein encodes two immunoglobulin chains. In some embodiments, a single polyribonucleotide can include a first coding region that encodes a first immunoglobulin chain of an antibody and a second coding region that encodes a second immunoglobulin chain of the antibody. In some embodiments, the first coding region and the second coding region are separated by an internal ribosome entry sides (IRES), an internal promoter, or a peptide sequence, such as “self-cleaving” 2A or 2A-like sequences (see, e.g., Szymczak et al. Nat Biotechnol 22:589, May 2004; ePub Apr. 4 2004, which is herein incorporated by reference) to yield the first immunoglobulin chain and the second immunoglobulin chain from the single polyribonucleotide.

[0426] Antibody agents encoded by one or more polyribonucleotides described herein may be in various formats described herein. Exemplary types of antibody agents include, but are not limited to monoclonal antibodies or polyclonal antibodies. In some embodiments, an antibody agent may include one or more sequence elements that are humanized, chimeric, etc., as is known in the art. An antibody agent utilized in accordance with the present disclosure, in some embodiments, is in a format selected from, but not limited to, intact IgG, IgA, IgG, IgE or IgM antibodies; bi- or multi-specific antibodies (e.g., Zybodies®, etc.); CrossMabs (e.g., CrossMab^{CH1-CLx}; CrossMab^{CH1-CLcv}; bispecific CrossMab^{CH1-CLx} with knob-in-holes); antibody fragments such as Fab fragments, Fab′ fragments, F(ab′)2 fragments, Fd′ fragments, Fd fragments, and isolated complementarity determining regions (CDRs) or sets thereof; single chain Fvs (scFvs); scFv-Fc fusions; polypeptide-Fc fusions; single domain antibodies (e.g., shark single domain antibodies such as IgNAR or fragments thereof); cameloid antibodies; masked antibodies (e.g., Probodies®); Small Modular ImmunoPharmaceuticals (“SMIPs™”); single chain or Tandem diabodies (TandAb®); VHHs; Anticalins®; Nanobodies® minibodies; BiTE®s; ankyrin repeat proteins or DARPINs®; Avimers®; DARTs; TCR-like antibodies; Adnectins®; Affilins®; Trans-Bodies®; Affibodies®; TrimerX®; MicroProteins; Fynomers®, Centyrins®; and KALBITOR®s. In some embodiments, immunoglobulin chains and/or fragments of such antibodies may be used in combination, e.g., an scFv-Fc arm with a conventional antibody arm.

[0427] Exemplary formats that may be used in accordance with the present disclosure are described further below.

### A. Conventional Antibody

[0428] In some embodiments, polyribonucleotides described herein can be used to express a conventional antibody. As used herein, a “conventional antibody” refers to an antibody agent that includes two heavy chains and two light chains (see e.g., FIG. 5A and FIG. 4A). Each heavy chain includes a heavy chain variable domain operably linked to one or more heavy chain constant domains. In some embodiments, one or more heavy chain constant domains comprise a CH1 domain, a hinge domain, a CH2 domain, a CH3 domain, or a combination thereof. In some instances, one or more heavy chain constant domains comprise a CH1 domain, a hinge domain, a CH2 domain, a CH3 domain, a CH4 domain, or a combination thereof. Each light chain includes a light chain variable domain operably linked to a light chain constant domain.

[0429] Typically, a heavy chain variable domain and a light chain variable domain can be further subdivided into regions of variability, termed complementarity determining regions (CDRs), interspersed with regions that are more conserved, termed framework regions (FR). Such heavy chain variable domains and light chain variable domains can each include, e.g., three CDRs and four framework regions, arranged from amino-terminus to carboxyl-terminus in the following order: FR1, CDR1, FR2, CDR2, FR3, CDR3, FR4, one or more of which can be engineered as described herein. The CDRs in a heavy chain are designated “HCDR1”, “HCDR2”, and “HCDR3”, respectively, and the CDRs in a light chain are designated “LCDR1”, “LCDR2”, and “LCDR3”.

[0430] A conventional antibody as described herein may comprise any one of the five major classes of antibodies: IgA, IgD, IgE, IgG, and IgM. In some embodiments, a conventional antibody comprises an IgG or IgA antibody. In some embodiments, a conventional antibody described herein comprises a particular isotype selected from the group of IgA and IgG isotypes: IgG1, IgG2, IgG3, IgG4, IgA1, and IgA2. Additionally, in some embodiments, a conventional antibody may include any particular heavy chain constant domains that correspond to the different classes of immunoglobulins which include α, δ, ε, γ, and, respectively. In some embodiments, a conventional antibody is an intact IgG1 antibody or other antibody class or isotype as described herein. (see, e.g., Hudson et al., Nat. Med., 9:129-134 (2003); Pluckthun, The Pharmacology of Monoclonal Antibodies, vol. 113, pp. 269-315 (1994); Hollinger et al., Proc. Natl. Acad. Sci. USA, 90:6444-6448 (1993); WO93/01161; and U.S. Pat. Nos. 5,571,894, 5,869,046, 6,248,516, and 5,587,458, each of which are herein incorporated by reference). In addition to the various isotypes, allelic variation is present among the IgG subclasses, giving rise to allotypic variants or allotypes. An IgG antibody agent as described herein may comprises a particular allotype, including but not limited to G1m3, Glm17, G1m17,1 or G1m17,1,2 or G1m3,1 (see Vidarsson et al., Front. Immunol, 5(520): 1-17, 2014, which is incorporated herein by reference in its entirety).

[0431] The Fc region of conventional antibodies binds to elements of the complement system, and also to receptors on effector cells, including for example effector cells that mediate cytotoxicity. As is known in the art, affinity and/or other binding attributes of Fc regions for Fc receptors can be modulated through glycosylation or other modification. In some embodiments, conventional antibodies produced and/or utilized in accordance with the present invention include glycosylated Fc domains, including Fc domains with modified or engineered such glycosylation. In some embodiments, conventional antibodies are naturally produced (e.g., generated by an organism reacting to an antigen), or produced by recombinant engineering, chemical synthesis, or other artificial system or methodology. In some embodiments, a conventional antibody is polyclonal; in some embodiments, a conventional antibody is monoclonal. In some embodiments, a conventional antibody has constant region sequences that are characteristic of mouse, rabbit, primate, or human antibodies. In some embodiments, a conventional antibody sequence elements are humanized, primatized, chimeric, etc., as is known in the art.

[0432] A conventional antibody as described herein is an antibody having a structure substantially similar to a native antibody structure or having heavy chains that contain an Fc region as defined herein.

[0433] In some embodiments, a conventional antibody encoded by one or more polyribonucleotides provided herein includes all or part of a 1-18 antibody. In some embodiments, a conventional antibody comprises a heavy chain variable domain comprising: (i) HCDR1 (DDPYTDDDTFTKYW; SEQ ID NO: 6); (ii) HCDR2 (ISPHFARP; SEQ ID NO: 9); (iii) HCDR3 (ARDPFGDRAPHYNYHMDV; SEQ ID NO: 12); or (iv) a combination thereof. In some embodiments, a conventional antibody comprises a heavy chain variable domain comprising: (i) HCDR1 (DDPYTDDDTFTKYW; SEQ ID NO: 6); (ii) HCDR2 (ISPHFARP; SEQ ID NO: 9); and (iii) HCDR3 (ARDPFGDRAPHYNYHMDV; SEQ ID NO: 12). In some embodiments, a conventional antibody comprises a light chain variable domain comprising: (i) LCDR1 (QGLDSSH; SEQ ID NO: 15); (ii) LCDR2 (GTS; SEQ ID NO: 18); (iii) LCDR3 (QRYGGTPIT; SEQ ID NO: 21); or (iv) a combination thereof. In some embodiments, a conventional antibody comprises a light chain variable domain comprising: (i) LCDR1 (QGLDSSH; SEQ ID NO: 15); (ii) LCDR2 (GTS; SEQ ID NO: 18); and (iii) LCDR3 (QRYGGTPIT; SEQ ID NO: 21). In some embodiments, a conventional antibody comprises (a) a heavy chain variable domain comprising: (i) HCDR1 (DDPYTDDDTFTKYW; SEQ ID NO: 6); (ii) HCDR2 (ISPHFARP; SEQ ID NO: 9); (iii) HCDR3 (ARDPFGDRAPHYNYHMDV; SEQ ID NO: 12); or (iv) a combination thereof; and (b) a light chain variable domain comprising: (i) LCDR1 (QGLDSSH; SEQ ID NO: 15); (ii) LCDR2 (GTS; SEQ ID NO: 18); (iii) LCDR3 (QRYGGTPIT; SEQ ID NO: 21); or (iv) a combination thereof. In some embodiments, a conventional antibody comprises (a) a heavy chain variable domain comprising: (i) HCDR1 (DDPYTDDDTFTKYW; SEQ ID NO: 6); (ii) HCDR2 (ISPHFARP; SEQ ID NO: 9); and (iii) HCDR3 (ARDPFGDRAPHYNYHMDV; SEQ ID NO: 12); and (b) a light chain variable domain comprising: (i) LCDR1 (QGLDSSH; SEQ ID NO: 15); (ii) LCDR2 (GTS; SEQ ID NO: 18); and (iii) LCDR3 (QRYGGTPIT; SEQ ID NO: 21).

[0434] In some embodiments, a polyribonucleotide described herein encodes an immunoglobulin chain of a conventional antibody, wherein the immunoglobulin chain comprises a heavy chain variable domain, and wherein the heavy chain variable domain comprises: (i) HCDR1 (DDPYTDDDTFTKYW; SEQ ID NO: 6); (ii) HCDR2 (ISPHFARP; SEQ ID NO: 9); (iii) HCDR3 (ARDPFGDRAPHYNYHMDV; SEQ ID NO: 12); or (iv) a combination thereof. In some embodiments, a polyribonucleotide described herein encodes an immunoglobulin chain of a conventional antibody, wherein the immunoglobulin chain comprises a heavy chain variable domain, and wherein the heavy chain variable domain comprises: (i) HCDR1 (DDPYTDDDTFTKYW; SEQ ID NO: 6); (ii) HCDR2 (ISPHFARP; SEQ ID NO: 9); and (iii) HCDR3 (ARDPFGDRAPHYNYHMDV; SEQ ID NO: 12). In some embodiments, a polyribonucleotide described herein encodes an immunoglobulin chain of a conventional antibody, wherein the immunoglobulin chain comprises a light chain variable domain, and wherein the light chain variable domain comprises: (i) LCDR1 (QGLDSSH; SEQ ID NO: 15); (ii) LCDR2 (GTS; SEQ ID NO: 18); (iii) LCDR3 (QRYGGTPIT; SEQ ID NO: 21); or (iv) a combination thereof. In some embodiments, a polyribonucleotide described herein encodes an immunoglobulin chain of a conventional antibody, wherein the immunoglobulin chain comprises a light chain variable domain, and wherein the light chain variable domain comprises: (i) LCDR1 (QGLDSSH; SEQ ID NO: 15); (ii) LCDR2 (GTS; SEQ ID NO: 18); and (iii) LCDR3 (QRYGGTPIT; SEQ ID NO: 21). In some embodiments, a polyribonucleotide described herein encodes two immunoglobulin chains of a conventional antibody: a first immunoglobulin chain comprising a heavy chain variable domain, wherein the heavy chain variable domain comprises: (i) HCDR1 (DDPYTDDDTFTKYW; SEQ ID NO: 6); (ii) HCDR2 (ISPHFARP; SEQ ID NO: 9); (iii) HCDR3 (ARDPFGDRAPHYNYHMDV; SEQ ID NO: 12); or (iv) a combination thereof; and a second immunoglobulin chain comprising a light chain variable domain, wherein the light chain variable domain comprises: (i) LCDR1 (QGLDSSH; SEQ ID NO: 15); (ii) LCDR2 (GTS; SEQ ID NO: 18); (iii) LCDR3 (QRYGGTPIT; SEQ ID NO: 21); or (iv) a combination thereof. In some embodiments, a polyribonucleotide described herein encodes two immunoglobulin chains of a conventional antibody: a first immunoglobulin chain comprising a heavy chain variable domain, wherein the heavy chain variable domain comprises: (i) HCDR1 (DDPYTDDDTFTKYW; SEQ ID NO: 6); (ii) HCDR2 (ISPHFARP; SEQ ID NO: 9); and (iii) HCDR3 (ARDPFGDRAPHYNYHMDV; SEQ ID NO: 12); and a second immunoglobulin chain comprising a light chain variable domain, wherein the light chain variable domain comprises: (i) LCDR1 (QGLDSSH; SEQ ID NO: 15); (ii) LCDR2 (GTS; SEQ ID NO: 18); and (iii) LCDR3 (QRYGGTPIT; SEQ ID NO: 21).

[0435] In some embodiments, a conventional antibody encoded by one or more polyribonucleotides provided herein comprises a heavy chain variable domain having at least 80%, 85%, 90%, 91%, 92%, 93%, 94%, 95%, 96%, 97%, 98%, or 99% sequence identity to an amino acid sequence represented by SEQ ID NO: 24. In some embodiments, a conventional antibody encoded by one or more polyribonucleotides provided herein comprises a light chain variable domain having at least 80%, 85%, 90%, 91%, 92%, 93%, 94%, 95%, 96%, 97%, 98%, or 99% identity to an amino acid sequence represented by SEQ ID NO: 29. In some embodiments, a conventional antibody comprises a heavy chain variable domain represented by SEQ ID NO: 24. In some embodiments, conventional antibody comprises a light chain variable domain represented by SEQ ID NO: 29.

[0436] In some embodiments, a polyribonucleotide described herein encodes an immunoglobulin chain of a conventional antibody, wherein the immunoglobulin chain comprises a heavy chain variable domain having at least 80%, 85%, 90%, 91%, 92%, 93%, 94%, 95%, 96%, 97%, 98%, or 99% sequence identity to an amino acid sequence represented by SEQ ID NO: 24. In some embodiments, a polyribonucleotide described herein encodes an immunoglobulin chain of a conventional antibody, wherein the immunoglobulin chain comprises a light chain variable domain having at least 80%, 85%, 90%, 91%, 92%, 93%, 94%, 95%, 96%, 97%, 98%, or 99% sequence identity to an amino acid sequence represented by SEQ ID NO: 29.

[0437] Conventional antibodies encoded by one or more polyribonucleotides as described herein may comprise one or more heavy chain constant domains. In some embodiments, one or more heavy chain constant domains comprise a CH3 domain. In some embodiments, a conventional antibody encoded by one or more polyribonucleotides as described herein comprises a CH3 domain that comprises a G1m3, G1m17, or a Glm17,1 allotype. In some embodiments, a conventional antibody encoded by one or more polyribonucleotides as described herein comprises a CH3 domain having an amino acid sequence at least 90%, 91%, 92%, 93%, 94%, 95%, 96%, 97%, 98%, or 99% identical to a sequence represented in any one of SEQ ID NOs: 68, 71, 74, 77, 80, 83, 86, or 89. In some embodiments, a conventional antibody encoded by one or more polyribonucleotides as described herein comprises a CH3 domain having an amino acid sequence represented in any one of SEQ ID NOs: 68, 71, 74, 77, 80, 83, 86, or 89.

[0438] Conventional antibodies encoded by one or more polyribonucleotides as described herein may comprise one or more heavy chain constant domains comprising an amino acid modification (e.g., a substitution or deletion) at one or more amino acid positions. For example, a conventional antibody encoded by one or more polyribonucleotides as described herein may include an L/S mutation within a CH₃ region (for enhanced FcRn binding) (see Zalevsky J et al. Nat Biotechnol. 2010, which is herein incorporated by reference). Such mutations are noted as M428L and N434S according to EU numbering, and referred to herein as “LS” or “L/S” (see e.g., FIG. 5C). In some embodiments, a conventional antibody encoded by one or more polyribonucleotides as described herein comprises an E294 deletion (for Fc hypersialylation) (see Bas M et al. J Immunol 2019, which is herein incorporated by reference.

[0439] The present disclosure also provides technologies that can be used to express an antibody agent, e.g., as illustrated in FIG. 3 or described in Stadler et al. (2016) Oncoimmunology 5(3): e1091555; and/or in Stadler et al. (2017) Nature Medicine 23(7): 815-817. Challenges exist in producing multiple antibody agents from a single composition (e.g., a composition comprising polyribonucleotides sufficient to encode multiple antibody agents), particularly because the random pairing of different antibody heavy and light chains can yield undesired antibody species. Due to the presence of mispaired byproducts, and significantly reduced production yields, sophisticated purification procedures are required to isolate the desired antibody agent in those situations (see e.g. Morrison, S. L., Nature Biotech. 25, 1233-1234, 2007, which is herein incorporated by reference). In general, the same problem of mispaired byproducts remains if recombinant expression techniques are used. One approach to solve the problem of mispaired byproducts is known as “knob-into-holes technology” (KIH), which aims to force the pairing of two different antibody heavy chains by introducing mutations into the CH3 domains to modify the contact interface. On one chain bulky amino acids were replaced by amino acids with short side chains to create a “hole” and amino acids with large side chains were introduced into the other CH3 domain, to create a “knob”. By co-expressing these two heavy chains with two light chains, high yields of heterodimer formation versus homodimer was observed (see Ridgway, J. B., et al, Protein Eng. 9, 617-621, 1996; and WO 96/027011, which are herein incorporated by reference). In some embodiments, antibody agents described herein utilize KIH technology as described in, e.g., WO 1998/050431, which is herein incorporated by reference in its entirety. As described herein, an antibody agent may comprise certain mutations that utilize KIH technology that include, but are not limited to, a CH3 modification. In some embodiments, an antibody agent comprises a CH3 domain comprising one or more of the following mutations: Y349C, T366S, L368A, and Y407V (according to EU numbering). In some embodiments, an antibody agent comprises a CH3 domain, wherein the CH3 domain comprises each of the following mutations: Y349C, T366S, L368A, and Y407V (according to EU numbering). Such a combination of mutations is referred to herein as “cah”. In some embodiments, an antibody agent comprises a CH3 domain comprising one or more mutations selected from: S354C and T366W (according to EU numbering). In some embodiments, an antibody agent comprises a CH3 domain comprising each of the following mutations: S354C and T366W (according to EU numbering). Such a combination of CH3 mutations is referred to herein as “cak”.

[0440] Accordingly, in some embodiments, a conventional antibody encoded by one or more polyribonucleotides as described herein comprises a CH3 domain comprising one or more of the following mutations: Y349C, T366S, L368A, and Y407V (according to EU numbering). In some embodiments, a conventional antibody encoded by one or more polyribonucleotides as described herein comprises a CH3 domain comprising one or more mutations selected from: S354C and T366W (according to EU numbering).

[0441] In some embodiments, a polyribonucleotide encodes a CH3 domain that comprises one of the following substitution mutations: M428, N434S, or a combination thereof (e.g., an “L/S” mutation). In some embodiments, a polyribonucleotide comprises a CH3 ribonucleic acid sequence that comprises any one of SEQ ID NOs: 75 and 78. In some embodiments, a polyribonucleotide encodes a CH3 domain that comprises one or more of the following substitution mutations: Y349C, T366S, L368A, and Y407V (according to EU numbering). In some embodiments, a polyribonucleotide comprises a ribonucleic acid sequence according to SEQ ID NO: 81 and 84. In some embodiments, a polyribonucleotide encodes a CH3 domain that comprises one or both of the following substitution mutations: S354C and T366W (according to EU numbering). In some embodiments, a polyribonucleotide comprises a ribonucleic acid sequence according to SEQ ID NO: 87 and 90.

[0442] In some embodiments, a polyribonucleotide encodes an immunoglobulin chain that VH domain operably linked to one or more constant domains, where the one or more constant domains comprise a CH3 domain. In some embodiments, a polyribonucleotide comprises a ribonucleic acid sequence according to SEQ ID NO: 69. In some embodiments, polyribonucleotide comprises a CH3 ribonucleic acid sequence that encodes the CH3 domain that comprises a G1m3, G1m17, or a Glm17,1 allotype. In some embodiments, a polyribonucleotide comprises a CH3 ribonucleic acid sequence that comprises any one of SEQ ID NOs: 69 and 72.

[0443] In some embodiments, a conventional antibody encoded by one or more polyribonucleotides as described herein comprises a CH1 domain. In some embodiments, a conventional antibody encoded by one or more polyribonucleotides as described herein comprises a CH1 domain that comprises a G1m3 allotype. In some embodiments, a conventional antibody encoded by one or more polyribonucleotides as described herein comprises a CH1 domain that comprises a G1m17 allotype. In some embodiments, a conventional antibody encoded by one or more polyribonucleotides as described herein comprises a CH1 domain that comprises an amino acid represented in SEQ ID NO: 38 or 41.

[0444] In some embodiments, a polyribonucleotide encodes an immunoglobulin chain that comprises a VH domain operably linked to one or more constant domains, where the one or more constant domains comprise a CH1 domain. In some embodiments, a polyribonucleotide comprises a CH1 ribonucleic acid sequence according to SEQ ID NO: 39. In some embodiments, a polyribonucleotide encodes a CH1 domain that comprises a G1m3 allotype. In some embodiments, a polyribonucleotide encodes a CH1 domain that comprises a G1m17 allotype. In some embodiments, a polyribonucleotide encodes a CH1 ribonucleic acid sequence according to SEQ ID NO: 39 or 42.

[0445] In some embodiments, a polyribonucleotide encodes a CH1 domain that comprises one or more mutations. In some embodiments, a polyribonucleotide encodes a CH1 domain that comprises the addition of one or more serine residues. In some embodiments, a polyribonucleotide encodes a CH1 domain that comprises addition of two additional serine residues (referred to herein as “SS”). In some embodiments, a polyribonucleotide encodes a CH1 ribonucleic acid sequence that is at least 90%, 91%, 92%, 93%, 94%, 95%, 96%, 97%, 98%, or 99% identical to SEQ ID NO: 45 or 48. In some embodiments, a polyribonucleotide encodes a CH1 ribonucleic acid sequence represented in SEQ ID NO: 45 or 48. In some embodiments, a polyribonucleotide encodes a CH1 domain that comprises one or more charge variant mutations. In some embodiments, a polyribonucleotide encodes a CH1 domain comprising one or more substitution mutations selected from: K147E, K213D, or a combination thereof. In some embodiments, a polyribonucleotide encodes a CH1 ribonucleic acid sequence that has at least 90%, 91%, 92%, 93%, 94%, 95%, 96%, 97%, 98%, or 99% sequence identity to SEQ ID NO: 51 or 866. In some embodiments, a polyribonucleotide encodes a CH1 ribonucleic acid sequence according to SEQ ID NO: 51 or 866.

[0446] In some embodiments, a conventional antibody encoded by one or more polyribonucleotides as described herein comprises a hinge domain. In some embodiments, a conventional antibody encoded by one or more polyribonucleotides as described herein comprises a hinge domain that comprises an amino acid sequence represented in SEQ ID NO: 104 (herein referred to as “hinge” in Tables 2 and 4).

[0447] In some embodiments, a polyribonucleotide encodes a hinge domain. In some embodiments, a polyribonucleotide encodes a hinge ribonucleic acid sequence that represented in SEQ ID NO: 105. In some embodiments, a polyribonucleotide encodes a hinge domain that comprises an amino acid modification that comprises a deletion of one or more amino acid residues. In some embodiments, a polyribonucleotide encodes a hinge domain an amino acid modification that comprises a deletion of amino acid residues EPKSC in a conventional Ig hinge domain (represented in SEQ ID NO: 104). Such a modification is referred to herein as “Hinge_del” or “ΔEPKSC”. In some embodiments, a polyribonucleotide encodes a hinge ribonucleic acid sequence represented in SEQ ID NO: 111. In some embodiments, a polyribonucleotide encodes a hinge domain that comprises an amino acid modification that comprises a C220S mutation (according to EU numbering). Such a mutated hinge domain is referred to herein as “Hinge_S” or “C/S”. In some embodiments, a polyribonucleotide encodes a hinge ribonucleic acid sequence represented in SEQ ID NO: 108.

[0448] In some embodiments, a conventional antibody encoded by one or more polyribonucleotides as described herein comprises a CH2 domain. In some embodiments, a conventional antibody encoded by one or more polyribonucleotides as described herein comprises a CH2 domain having an amino acid sequence at least 90%, 91%, 92%, 93%, 94%, 95%, 96%, 97%, 98%, or 99% identical to represented in SEQ ID NO: 53. In some embodiments, a conventional antibody encoded by one or more polyribonucleotides as described herein comprises a CH2 domain having an amino acid sequence represented in SEQ ID NO: 53.

[0449] In some embodiments, a conventional antibody encoded by one or more polyribonucleotides as described herein comprises a CH2 domain having one or more mutations (e.g., with respect to SEQ ID NO: 53). For example, in some embodiments, a conventional antibody encoded by one or more polyribonucleotides as described herein comprises one or more of the following mutations: G236A, A330L, and I332E (according to EU numbering). In some embodiments, a conventional antibody encoded by one or more polyribonucleotides as described herein comprises the following mutations: G236A, A330L, and I332E (according to EU numbering), referred to herein as “GAALIE”. Such mutations in the CH2 domain have been associated with increased affinity to Fc receptors FcgRIIA and FcgRIII for enhanced antibody effector function.

[0450] In some embodiments, a conventional antibody encoded by one or more polyribonucleotides as described herein comprises a CH2 domain having an amino acid sequence that is at least 90%, 91%, 92%, 93%, 94%, 95%, 96%, 97%, 98%, or 99% identical to SEQ ID NO: 56. In some embodiments, a conventional antibody encoded by one or more polyribonucleotides as described herein comprises a CH2 domain having an amino acid sequence represented in SEQ ID NO: 56.

[0451] In some embodiments, a conventional antibody encoded by one or more polyribonucleotides as described herein comprises one or more mutations selected from: G236A and I332E (according to EU numbering). In some embodiments, a conventional antibody encoded by one or more polyribonucleotides as described herein comprises the mutations selected from: G236A and I332E (according to EU numbering), referred to herein as “GAIE”. In some embodiments, a conventional antibody encoded by one or more polyribonucleotides as described herein comprises a CH2 domain having an amino acid sequence at least 90%, 91%, 92%, 93%, 94%, 95%, 96%, 97%, 98%, or 99% identical to SEQ ID NO: 59. In some embodiments, a conventional antibody encoded by one or more polyribonucleotides as described herein comprises a CH2 domain having an amino acid sequence represented in SEQ ID NO: 59.

[0452] In some embodiments, a conventional antibody encoded by one or more polyribonucleotides as described herein comprises a mutation: G236A (according to EU numbering), referred to herein as “GA”. In some embodiments, a conventional antibody encoded by one or more polyribonucleotides as described herein comprises a CH2 domain having an amino acid sequence at least 90%, 91%, 92%, 93%, 94%, 95%, 96%, 97%, 98%, or 99% identical to SEQ ID NO: 62. In some embodiments, a conventional antibody encoded by one or more polyribonucleotides as described herein comprises a CH2 domain having an amino acid sequence represented in SEQ ID NO: 62.

[0453] In some embodiments, a conventional antibody encoded by one or more polyribonucleotides as described herein comprises a mutation: I332E (according to EU numbering), referred to herein as “IE”. In some embodiments, a conventional antibody encoded by one or more polyribonucleotides as described herein comprises a CH2 domain having an amino acid sequence at least 90%, 91%, 92%, 93%, 94%, 95%, 96%, 97%, 98%, or 99% identical to SEQ ID NO: 65. In some embodiments, a conventional antibody encoded by one or more polyribonucleotides as described herein comprises a CH2 domain having an amino acid sequence represented in SEQ ID NO: 65.

[0454] In some embodiments, a polyribonucleotide encodes an immunoglobulin chain that comprises a VH domain operably linked to one or more constant domains, wherein the one or more constant domains comprise a CH2 domain. In some embodiments, a polyribonucleotide comprises a ribonucleic acid sequence that according to SEQ ID NO: 54. In some embodiments, a CH2 ribonucleic acid encodes a CH2 domain with one or more amino acid substitution mutations. For example, in some embodiments, a CH2 ribonucleic acid sequence encodes one or more of the following mutations: G236A, A330L, and I332E (according to EU numbering), referred to herein as “GAALIE”. Such mutations in the CH2 domain have been associated with increased affinity to Fc receptors FcgRIIA and FcgRIII for enhanced antibody effector function. In some embodiments, a CH2 ribonucleic sequence comprises or consists of a sequence according to SEQ ID NO: 57. In some embodiments, a CH2 ribonucleic acid sequence encodes the one or more of the following mutation: G236A and I332E (according to EU numbering), referred to herein as “GAIE”. In some embodiments, a CH2 ribonucleic sequence comprises of a sequence according to SEQ ID NO: 60. In some embodiments, a CH2 ribonucleic acid sequence encodes the mutation G236A (according to EU numbering), referred to herein as “GA”. In some embodiments, a CH2 ribonucleic sequence comprises of a sequence according to SEQ ID NO: 63. In some embodiments, a CH2 ribonucleic acid sequence encodes the mutation: I332E (according to EU numbering), referred to herein as “IE”. In some embodiments, a CH2 ribonucleic sequence comprises of a sequence according to SEQ ID NO: 66. In some embodiments, a CH2 ribonucleic acid sequence encodes a CH2 domain that comprises an E294 deletion (according to EU numbering).

[0455] In some embodiments, a conventional antibody encoded by one or more polyribonucleotides as described herein comprises a signal peptide comprising a human signal peptide. In some embodiments, a conventional antibody encoded by one or more polyribonucleotides as described herein comprises a signal peptide comprising SEQ ID NO: 1.

[0456] In some embodiments, a conventional antibody encoded by one or more polyribonucleotides as described herein comprises a light chain constant domain, where the light chain constant domain comprises a kappa light chain constant domain. In some embodiments, a conventional antibody encoded by one or more polyribonucleotides as described herein comprises a kappa light chain constant domain having an amino acid sequence at least 80, 85, 90%, 91%, 92%, 93%, 94%, 95%, 96%, 97%, 98%, or 99% identical to SEQ ID NO: 92. In some embodiments, a conventional antibody encoded by one or more polyribonucleotides as described herein comprises a kappa light chain constant domain having an amino acid sequence represented in SEQ ID NO: 92. In some embodiments, a conventional antibody encoded by one or more polyribonucleotides as described herein comprises a lambda chain variable domain.

[0457] In some embodiments, a conventional antibody encoded by one or more polyribonucleotides as described herein comprises an immunoglobulin chain (e.g., an immunoglobulin heavy chain) encoded by a nucleic acid sequence that has at least 80%, 85%, 90%, 91%, 92%, 93%, 94%, 95%, 96%, 97%, 98%, or 99% sequence identity to a sequence represented by SEQ ID NOs: 113-160. In some embodiments, a conventional antibody encoded by one or more polyribonucleotides as described herein comprises an immunoglobulin chain (e.g., an immunoglobulin heavy chain) encoded by a nucleic acid sequence represented by any one of SEQ ID NOs: 113-160. In some embodiments, a conventional antibody encoded by one or more polyribonucleotides as described herein comprises an immunoglobulin chain (e.g., an immunoglobulin light chain) encoded by a nucleic acid sequence that has at least at least 80%, 85%, 90%, 91%, 92%, 93%, 94%, 95%, 96%, 97%, 98%, or 99% sequence identity to SEQ ID NO: 449. In some embodiments, a conventional antibody encoded by one or more polyribonucleotides as described herein comprises an immunoglobulin chain (e.g., an immunoglobulin light chain) encoded by a nucleic acid sequence represented by SEQ ID NO: 449.

[0458] In some embodiments, a conventional antibody encoded by one or more polyribonucleotides as described herein comprises an immunoglobulin chain (e.g., an immunoglobulin heavy chain) encoded by a nucleic acid sequence that has at least 80%, 85%, 90%, 91%, 92%, 93%, 94%, 95%, 96%, 97%, 98%, or 99% sequence identity to a sequence represented by any one of SEQ ID NO: 613, 616, 622, and 625. In some embodiments, a conventional antibody encoded by one or more polyribonucleotides as described herein comprises an immunoglobulin chain (e.g., an immunoglobulin light chain) encoded by a nucleic acid sequence that has at least 80%, 85%, 90%, 91%, 92%, 93%, 94%, 95%, 96%, 97%, 98%, or 99% sequence identity to a sequence represented by NO: 619. In some embodiments, a conventional antibody encoded by one or more polyribonucleotides as described herein comprises an immunoglobulin chain (e.g., an immunoglobulin heavy chain) encoded by a nucleic acid sequence represented by any one of SEQ ID NO: 613, 616, 622, and 625. In some embodiments, a conventional antibody encoded by one or more polyribonucleotides as described herein comprises an immunoglobulin chain (e.g., an immunoglobulin light chain) encoded by a nucleic acid sequence represented by NO: 619.

[0459] In some embodiments, a conventional antibody encoded by one or more polyribonucleotides as described herein comprises an immunoglobulin chain (e.g., an immunoglobulin heavy chain) that comprises an amino acid sequence that has at least 80%, 85%, 90%, 91%, 92%, 93%, 94%, 95%, 96%, 97%, 98%, or 99% sequence identity to a sequence represented by any one of SEQ ID NOs: 614, 617, 623, and 626. In some embodiments, a conventional antibody encoded by one or more polyribonucleotides as described herein comprises an immunoglobulin chain (e.g., an immunoglobulin heavy chain) that comprises an amino acid sequence represented by any one of SEQ ID NOs: 614, 617, 623, and 626. In some embodiments, a conventional antibody encoded by one or more polyribonucleotides as described herein comprises an immunoglobulin chain (e.g., an immunoglobulin light chain) that comprises an amino acid sequence that has at least at least 80%, 85%, 90%, 91%, 92%, 93%, 94%, 95%, 96%, 97%, 98%, or 99% sequence identity to SEQ ID NO: 620. In some embodiments, a conventional antibody encoded by one or more polyribonucleotides as described herein comprises an immunoglobulin chain (e.g., an immunoglobulin light chain) that comprises an amino acid sequence represented by SEQ ID NO: 620.

[0460] Exemplary immunoglobulin chain (e.g., immunoglobulin heavy chain or light chain) configurations of a conventional antibody, as described herein, are shown in Table 2 below.

TABLE 2
Exemplary Immunoglobulin Chain Configurations

| IgG Format - | | | | | | |
|---|---|---|---|---|---|---|
| Heavy Chain | Allotype | VH | CH1 | Hinge | CH2 | CH3 |
| 1-18 VH G1m3 | G1m3 | 1-18 | CH1_G1m3 | Hinge | CH2 | CH3_G1m3/17 |
| 1-18 VH G1m3 LS | G1m3 | 1-18 | CH1_G1m3 | Hinge | CH2 | CH3_LS_G1m3/17 |
| 1-18 VH G1m3 | G1m3 | 1-18 | CH1_G1m3 | Hinge | CH2 | CH3_cah_LS_G1m3/17 |
| cah LS | | | | | | |
| 1-18 VH G1m3 | G1m3 | 1-18 | CH1_G1m3 | Hinge | CH2 | CH3_cak_LS_G1m3/17 |
| cak LS | | | | | | |
| 1-18 VH G1m3 | G1m3 | 1-18 | CH1_G1m3 | Hinge | CH2_GAALIE | CH3_LS_G1m3/17 |
| GAALIE LS | | | | | | |
| 1-18 VH G1m3 | G1m3 | 1-18 | CH1_G1m3 | Hinge | CH2_GAIE | CH3_LS_G1m3/17 |
| GAIE LS | | | | | | |
| 1-18 VH G1m3 | G1m3 | 1-18 | CH1_G1m3 | Hinge | CH2_GA | CH3_LS_G1m3/17 |
| GA LS | | | | | | |
| 1-18 VH G1m3 | G1m3 | 1-18 | CH1_G1m3 | Hinge | CH2_IE | CH3_LS_G1m3/17 |
| IE LS | | | | | | |
| 1-18 VH G1m3 | G1m3 | 1-18 | CH1_G1m3 | Hinge | CH2_GAALIE | CH3_cah_LS_G1m3/17 |
| GAALIE cah LS | | | | | | |
| 1-18 VH G1m3 | G1m3 | 1-18 | CH1_G1m3 | Hinge | CH2_GAIE | CH3_cah_LS_G1m3/17 |
| GAIE cah LS | | | | | | |
| 1-18 VH G1m3 | G1m3 | 1-18 | CH1_G1m3 | Hinge | CH2_GA | CH3_cah_LS_G1m3/17 |
| GA cah LS | | | | | | |
| 1-18 VH G1m3 | G1m3 | 1-18 | CH1_G1m3 | Hinge | CH2_IE | CH3_cah_LS_G1m3/17 |
| IE cah LS | | | | | | |
| 1-18 VH G1m3 | G1m3 | 1-18 | CH1_G1m3 | Hinge | CH2_GAALIE | CH3_cak_LS_G1m3/17 |
| GAALIE cak LS | | | | | | |
| 1-18 VH G1m3 | G1m3 | 1-18 | CH1_G1m3 | Hinge | CH2_GAIE | CH3_cak_LS_G1m3/17 |
| GAIE cak LS | | | | | | |
| 1-18 VH G1m3 | G1m3 | 1-18 | CH1_G1m3 | Hinge | CH2_GA | CH3_cak_LS_G1m3/17 |
| GA cak LS | | | | | | |
| 1-18 VH G1m3 | G1m3 | 1-18 | CH1_G1m3 | Hinge | CH2_IE | CH3_cak_LS_G1m3/17 |
| IE cak LS | | | | | | |
| 1-18 VH G1m17 | G1m17 | 1-18 | CH1_G1m17 | Hinge | CH2 | CH3_G1m3/17 |
| 1-18 VH G1m17 | G1m17 | 1-18 | CH1_G1m17 | Hinge | CH2 | CH3_LS_G1m3/17 |
| LS | | | | | | |
| 1-18 VH G1m17 | G1m17 | 1-18 | CH1_G1m17 | Hinge | CH2 | CH3_cah_LS_G1m3/17 |
| cah LS | | | | | | |
| 1-18 VH G1m17 | G1m17 | 1-18 | CH1_G1m17 | Hinge | CH2 | CH3_cak_LS_G1m3/17 |
| cak LS | | | | | | |
| 1-18 VH G1m17 | G1m17 | 1-18 | CH1_G1m17 | Hinge | CH2_GAALIE | CH3_LS_G1m3/17 |
| GAALIE LS | | | | | | |
| 1-18 VH G1m17 | G1m17 | 1-18 | CH1_G1m17 | Hinge | CH2_GAIE | CH3_LS_G1m3/17 |
| GAIE LS | | | | | | |
| 1-18 VH G1m17 | G1m17 | 1-18 | CH1_G1m17 | Hinge | CH2_GA | CH3_LS_G1m3/17 |
| GA LS | | | | | | |
| 1-18 VH G1m17 | G1m17 | 1-18 | CH1_G1m17 | Hinge | CH2_IE | CH3_LS_G1m3/17 |
| IE LS | | | | | | |
| 1-18 VH G1m17 | G1m17 | 1-18 | CH1_G1m17 | Hinge | CH2_GAALIE | CH3_cah_LS_G1m3/17 |
| GAALIE cah LS | | | | | | |
| 1-18 VH G1m17 | G1m17 | 1-18 | CH1_G1m17 | Hinge | CH2_GAIE | CH3_cah_LS_G1m3/17 |
| GAIE cah LS | | | | | | |
| 1-18 VH G1m17 | G1m17 | 1-18 | CH1_G1m17 | Hinge | CH2_GA | CH3_cah_LS_G1m3/17 |
| GA cah LS | | | | | | |
| 1-18 VH G1m17 | G1m17 | 1-18 | CH1_G1m17 | Hinge | CH2_IE | CH3_cah_LS_G1m3/17 |
| IE cah LS | | | | | | |
| 1-18 VH G1m17 | G1m17 | 1-18 | CH1_G1m17 | Hinge | CH2_GAALIE | CH3_cak_LS_G1m3/17 |
| GAALIE cak LS | | | | | | |
| 1-18 VH G1m17 | G1m17 | 1-18 | CH1_G1m17 | Hinge | CH2_GAIE | CH3_cak_LS_G1m3/17 |
| GAIE cak LS | | | | | | |
| 1-18 VH G1m17 | G1m17 | 1-18 | CH1_G1m17 | Hinge | CH2_GA | CH3_cak_LS_G1m3/17 |
| GA cak LS | | | | | | |
| 1-18 VH G1m17 | G1m17 | 1-18 | CH1_G1m17 | Hinge | CH2_IE | CH3_cak_LS_G1m3/17 |
| IE cak LS | | | | | | |
| 1-18 VH G1m17, 1 | G1m17, 1 | 1-18 | CH1_G1m17 | Hinge | CH2 | CH3_G1m17, 1 |
| 1-18 VH G1m17, 1 | G1m17, 1 | 1-18 | CH1_G1m17 | Hinge | CH2 | CH3_LS_G1m17, 1 |
| LS | | | | | | |
| 1-18 VH G1m17, 1 | G1m17, 1 | 1-18 | CH1_G1m17 | Hinge | CH2 | CH3_cah_LS_G1m17, 1 |
| cah LS | | | | | | |
| 1-18 VH G1m17, 1 | G1m17, 1 | 1-18 | CH1_G1m17 | Hinge | CH2 | CH3_cak_LS_G1m17, 1 |
| cak LS | | | | | | |
| 1-18 VH G1m17, 1 | G1m17, 1 | 1-18 | CH1_G1m17 | Hinge | CH2_GAALIE | CH3_LS_G1m17, 1 |
| GAALIE LS | | | | | | |
| 1-18 VH G1m17, 1 | G1m17, 1 | 1-18 | CH1_G1m17 | Hinge | CH2_GAIE | CH3_LS_G1m17, 1 |
| GAIE LS | | | | | | |
| 1-18 VH G1m17, 1 | G1m17, 1 | 1-18 | CH1_G1m17 | Hinge | CH2_GA | CH3_LS_G1m17, 1 |
| GA LS | | | | | | |
| 1-18 VH G1m17, 1 | G1m17, 1 | 1-18 | CH1_G1m17 | Hinge | CH2_IE | CH3_LS_G1m17, 1 |
| IE LS | | | | | | |
| 1-18 VH G1m17, 1 | G1m17, 1 | 1-18 | CH1_G1m17 | Hinge | CH2_GAALIE | CH3_cah_LS_G1m17, 1 |
| GAALIE cah LS | | | | | | |
| 1-18 VH G1m17, 1 | G1m17, 1 | 1-18 | CH1_G1m17 | Hinge | CH2_GAIE | CH3_cah_LS_G1m17, 1 |
| GAIE cah LS | | | | | | |
| 1-18 VH G1m17, 1 | G1m17, 1 | 1-18 | CH1_G1m17 | Hinge | CH2_GA | CH3_cah_LS_G1m17, 1 |
| GA cah LS | | | | | | |
| 1-18 VH G1m17, 1 | G1m17, 1 | 1-18 | CH1_G1m17 | Hinge | CH2_IE | CH3_cah_LS_G1m17, 1 |
| IE cah LS | | | | | | |
| 1-18 VH G1m17, 1 | G1m17, 1 | 1-18 | CH1_G1m17 | Hinge | CH2_GAALIE | CH3_cak_LS_G1m17, 1 |
| GAALIE cak LS | | | | | | |
| 1-18 VH G1m17, 1 | G1m17, 1 | 1-18 | CH1_G1m17 | Hinge | CH2_GAIE | CH3_cak_LS_G1m17, 1 |
| GAIE cak LS | | | | | | |
| 1-18 VH G1m17, 1 | G1m17, 1 | 1-18 | CH1_G1m17 | Hinge | CH2_GA | CH3_cak_LS_G1m17, 1 |
| GA cak LS | | | | | | |
| 1-18 VH G1m17, 1 | G1m17, 1 | 1-18 | CH1_G1m17 | Hinge | CH2_IE | CH3_cak_LS_G1m17, 1 |
| IE cak LS | | | | | | |
| IgG Format - | | | | | | |
| Light Chain | — | VL | CL | — | — | — |
| 1-18 VL Ck | — | 1-18 | Ck | — | — | — |

### B. CrossMab^{CH1-CLx}

[0461] The present disclosure also provides technologies that can be used to deliver and express an antibody agent as described herein in “CrossMab” format (see e.g., WO2015/101588 A1, WO 2009/080253A1, and Schaefer, W. et al, PNAS, 108, 11187-1191, 2011, which are herein incorporated by reference in their entirety). In some embodiments, antibody agents in CrossMab format contain a CL-CH₁ crossover in one or both binding arms (referred to herein as “CrossMab^{CH1-CLx}” or “CH1-CLx”). Such a modification reduces the byproduct formation caused by a mismatch of a light chain of a first antibody that specifically binds to a first antigen with the wrong heavy chain of a second antibody that specifically binds to a second antigen (when compared to approaches without such domain exchanges).

[0462] In some embodiments, an antibody agent encoded by one or more polyribonucleotides provided herein comprises a first immunoglobulin chain and a second immunoglobulin chain. In some embodiments, a polyribonucleotide may encode a first immunoglobulin chain and a second immunoglobulin chain of a CrossMab^{CH1-CLx} antibody agent as described herein. In some embodiments, a polyribonucleotide encoding a first immunoglobulin chain comprises a ribonucleic acid sequence encoding a VH domain, a CL domain, a hinge domain, a CH2 domain, and a CH3 domain. In some embodiments, a polyribonucleotide encoding a second immunoglobulin chain comprises a ribonucleic acid sequence encoding a light chain variable (VL) domain and a CH1 domain (see e.g., FIG. 4B). In some embodiments, a polyribonucleotide encoding a CrossMab^{CH1-CLx} antibody agent comprises a ribonucleic acid sequence that encodes any one of the immunoglobulin chain configurations in Table 3, corresponding to SEQ ID NOs: 161-208. In some embodiments, a polyribonucleotide encoding a CrossMab^{CH1-CLx} agent antibody comprises a ribonucleic acid sequence that encodes any one of the immunoglobulin chain configurations in Table 3, corresponding to SEQ ID NOs: 450 and 451.

[0463] In some embodiments, a CrossMab^{CH1-CLx} antibody agent may be encoded by two separate polyribonucleotide: a first polyribonucleotide comprising a coding region that encodes (in 5′ to 3′ order): a heavy chain variable domain (VH), a light chain constant region (CL), a hinge region, a CH2 domain, and a CH3 domain (see e.g., FIG. 9A); and a second polyribonucleotide comprising a coding region that encodes (in 5′ to 3′ order): a light chain variable domain (VL) and a CH1 domain (see e.g., FIG. 9B).

[0464] In some embodiments, a CrossMab^{CH1-CLx} antibody agent encoded by one or more polyribonucleotides provided herein includes all or part of a 1-18 antibody. In some embodiments, a CrossMab^{CH1-CLx} antibody agent comprises a heavy chain variable domain comprising: (i) HCDR1 (DDPYTDDDTFTKYW; SEQ ID NO: 6); (ii) HCDR2 (ISPHFARP; SEQ ID NO: 9); (iii) HCDR3 (ARDPFGDRAPHYNYHMDV; SEQ ID NO: 12); or (iv) a combination thereof. In some embodiments, a CrossMab^{CH1-CLx} antibody agent comprises a heavy chain variable domain comprising: (i) HCDR1 (DDPYTDDDTFTKYW; SEQ ID NO: 6); (ii) HCDR2 (ISPHFARP; SEQ ID NO: 9); and (iii) HCDR3 (ARDPFGDRAPHYNYHMDV; SEQ ID NO: 12). In some embodiments, a CrossMab^{CH1-CLx} antibody agent comprises a light chain variable domain comprising: (i) LCDR1 (QGLDSSH; SEQ ID NO: 15); (ii) LCDR2 (GTS; SEQ ID NO: 18); (iii) LCDR3 (QRYGGTPIT; SEQ ID NO: 21); or (iv) a combination thereof. In some embodiments, a CrossMab^{CH1-CLx} antibody agent comprises a light chain variable domain comprising: (i) LCDR1 (QGLDSSH; SEQ ID NO: 15); (ii) LCDR2 (GTS; SEQ ID NO: 18); and (iii) LCDR3 (QRYGGTPIT; SEQ ID NO: 21). In some embodiments, a CrossMab^{CH1-CLx} antibody agent comprises (a) a heavy chain variable domain comprising: (i) HCDR1 (DDPYTDDDTFTKYW; SEQ ID NO: 6); (ii) HCDR2 (ISPHFARP; SEQ ID NO: 9); (iii) HCDR3 (ARDPFGDRAPHYNYHMDV; SEQ ID NO: 12); or (iv) a combination thereof; and (b) a light chain variable domain comprising: (i) LCDR1 (QGLDSSH; SEQ ID NO: 15); (ii) LCDR2 (GTS; SEQ ID NO: 18); (iii) LCDR3 (QRYGGTPIT; SEQ ID NO: 21); or (iv) a combination thereof. In some embodiments, a CrossMab^{CH1-CLx} antibody agent comprises (a) a heavy chain variable domain comprising: (i) HCDR1 (DDPYTDDDTFTKYW; SEQ ID NO: 6); (ii) HCDR2 (ISPHFARP; SEQ ID NO: 9); and (iii) HCDR3 (ARDPFGDRAPHYNYHMDV; SEQ ID NO: 12); and (b) a light chain variable domain comprising: (i) LCDR1 (QGLDSSH; SEQ ID NO: 15); (ii) LCDR2 (GTS; SEQ ID NO: 18); and (iii) LCDR3 (QRYGGTPIT; SEQ ID NO: 21).

[0465] In some embodiments, a polyribonucleotide described herein encodes an immunoglobulin chain of a CrossMab^{CH1-CLx} antibody agent, wherein the immunoglobulin chain comprises a heavy chain variable domain, and wherein the heavy chain variable domain comprises: (i) HCDR1 (DDPYTDDDTFTKYW; SEQ ID NO: 6); (ii) HCDR2 (ISPHFARP; SEQ ID NO: 9); (iii) HCDR3 (ARDPFGDRAPHYNYHMDV; SEQ ID NO: 12); or (iv) a combination thereof. In some embodiments, a polyribonucleotide described herein encodes an immunoglobulin chain of a CrossMab^{CH1-CLx} antibody agent, wherein the immunoglobulin chain comprises a heavy chain variable domain, and wherein the heavy chain variable domain comprises: (i) HCDR1 (DDPYTDDDTFTKYW; SEQ ID NO: 6); (ii) HCDR2 (ISPHFARP; SEQ ID NO: 9); and (iii) HCDR3 (ARDPFGDRAPHYNYHMDV; SEQ ID NO: 12). In some embodiments, a polyribonucleotide described herein encodes an immunoglobulin chain of a CrossMab^{CH1-CLx} antibody agent, wherein the immunoglobulin chain comprises a light chain variable domain, and wherein the light chain variable domain comprises: (i) LCDR1 (QGLDSSH; SEQ ID NO: 15); (ii) LCDR2 (GTS; SEQ ID NO: 18); (iii) LCDR3 (QRYGGTPIT; SEQ ID NO: 21); or (iv) a combination thereof. In some embodiments, a polyribonucleotide described herein encodes an immunoglobulin chain of a CrossMab^{CH1-CLx} antibody agent, wherein the immunoglobulin chain comprises a light chain variable domain, and wherein the light chain variable domain comprises: (i) LCDR1 (QGLDSSH; SEQ ID NO: 15); (ii) LCDR2 (GTS; SEQ ID NO: 18); and (iii) LCDR3 (QRYGGTPIT; SEQ ID NO: 21). In some embodiments, a polyribonucleotide described herein encodes two immunoglobulin chains of a CrossMab^{CH1-CLx} antibody agent: a first immunoglobulin chain comprising a heavy chain variable domain, wherein the heavy chain variable domain comprises: (i) HCDR1 (DDPYTDDDTFTKYW; SEQ ID NO: 6); (ii) HCDR2 (ISPHFARP; SEQ ID NO: 9); (iii) HCDR3 (ARDPFGDRAPHYNYHMDV; SEQ ID NO: 12); or (iv) a combination thereof; and a second immunoglobulin chain comprising a light chain variable domain, wherein the light chain variable domain comprises: (i) LCDR1 (QGLDSSH; SEQ ID NO: 15); (ii) LCDR2 (GTS; SEQ ID NO: 18); (iii) LCDR3 (QRYGGTPIT; SEQ ID NO: 21); or (iv) a combination thereof. In some embodiments, a polyribonucleotide described herein encodes two immunoglobulin chains of a CrossMab^{CH1-CLx} antibody agent: a first immunoglobulin chain comprising a heavy chain variable domain, wherein the heavy chain variable domain comprises: (i) HCDR1 (DDPYTDDDTFTKYW; SEQ ID NO: 6); (ii) HCDR2 (ISPHFARP; SEQ ID NO: 9); and (iii) HCDR3 (ARDPFGDRAPHYNYHMDV; SEQ ID NO: 12); and a second immunoglobulin chain comprising a light chain variable domain, wherein the light chain variable domain comprises: (i) LCDR1 (QGLDSSH; SEQ ID NO: 15); (ii) LCDR2 (GTS; SEQ ID NO: 18); and (iii) LCDR3 (QRYGGTPIT; SEQ ID NO: 21).

[0466] In some embodiments, a CrossMab^{CH1-CLx} antibody agent encoded by one or more polyribonucleotides provided herein comprises a heavy chain variable domain having at least 80%, 85%, 90%, 91%, 92%, 93%, 94%, 95%, 96%, 97%, 98%, or 99% sequence identity to an amino acid sequence represented by SEQ ID NO: 24. In some embodiments, a CrossMab^{CH1-CLx} antibody agent encoded by one or more polyribonucleotides provided herein comprises a light chain variable domain having at least 80%, 85%, 90%, 91%, 92%, 93%, 94%, 95%, 96%, 97%, 98%, or 99% identity to an amino acid sequence represented by SEQ ID NO: 29. In some embodiments, a CrossMab^{CH1-CLx} antibody agent encoded by one or more polyribonucleotides provided herein comprises a heavy chain variable domain represented by SEQ ID NO: 24. In some embodiments, a CrossMab^{CH1-CLx} antibody agent encoded by one or more polyribonucleotides provided herein comprises a light chain variable domain represented by SEQ ID NO: 29.

[0467] In some embodiments, a polyribonucleotide described herein encodes an immunoglobulin chain of a CrossMab^{CH1-CLx} antibody agent, wherein the immunoglobulin chain comprises a heavy chain variable domain having at least 80%, 85%, 90%, 91%, 92%, 93%, 94%, 95%, 96%, 97%, 98%, or 99% sequence identity to an amino acid sequence represented by SEQ ID NO: 24. In some embodiments, a polyribonucleotide described herein encodes an immunoglobulin chain of a CrossMab^{CH1-CLx} antibody agent, wherein the immunoglobulin chain comprises a light chain variable domain having at least 80%, 85%, 90%, 91%, 92%, 93%, 94%, 95%, 96%, 97%, 98%, or 99% identity to an amino acid sequence represented by SEQ ID NO: 29. In some embodiments, a polyribonucleotide described herein encodes an immunoglobulin chain of a CrossMab^{CH1-CLx} antibody agent, wherein the immunoglobulin chain comprises a heavy chain variable domain represented by SEQ ID NO: 24. In some embodiments, a polyribonucleotide described herein encodes an immunoglobulin chain of a CrossMab^{CH1-CLx} antibody agent, wherein the immunoglobulin chain comprises a light chain variable domain represented by SEQ ID NO: 29.

[0468] As described above, CrossMab^{CH1-CLx} antibody agents encoded by one or more polyribonucleotides as described herein may comprise one or more heavy chain constant domains. In some embodiments, one or more heavy chain constant domains comprise a CH3 domain. In some embodiments, a CrossMab^{CH1-CLx} antibody agent encoded by one or more polyribonucleotides as described herein comprises a CH3 domain that comprises a G1m3, G1m17, or a Glm17,1 allotype. In some embodiments, a CrossMab^{CH1-CLx} antibody agent encoded by one or more polyribonucleotides as described herein comprises a CH3 domain having an amino acid sequence at least 90%, 91%, 92%, 93%, 94%, 95%, 96%, 97%, 98%, or 99% identical to a sequence represented in any one of SEQ ID NOs: 68, 71, 74, 77, 80, 83, 86, or 89. In some embodiments, a CrossMab^{CH1-CLx} antibody agent encoded by one or more polyribonucleotides as described herein comprises a CH3 domain having an amino acid sequence represented in any one of SEQ ID NOs: 68, 71, 74, 77, 80, 83, 86, or 89.

[0469] CrossMab^{CH1-CLx} antibody agents encoded by one or more polyribonucleotides as described herein may comprise one or more heavy chain constant domains comprising an amino acid modification (e.g., a substitution or deletion) at one or more amino acid positions. For example, a CrossMab^{CH1-CLx} antibody agent encoded by one or more polyribonucleotides as described herein may include an L/S mutation within a CH3 region (for enhanced FcRn binding) (see Zalevsky J et al. Nat Biotechnol. 2010, which is herein incorporated by reference). Such mutations are noted as M428L and N434S according to EU numbering, and referred to herein as “LS” or “L/S” (see e.g., FIG. 5C). In some embodiments, a CrossMab^{CH1-CLx} antibody agent encoded by one or more polyribonucleotides as described herein comprise an E294 deletion (for Fc hypersialylation) (see Bas M et al. J Immunol 2019, which is herein incorporated by reference).

[0470] In some embodiments, a CrossMab^{CH1-CLx} antibody agent encoded by one or more polyribonucleotides as described herein comprises a CH3 domain comprising one or more of the following mutations: Y349C, T366S, L368A, and Y407V (according to EU numbering). This combination of mutations is referred to herein as “cah”. In some embodiments, a CrossMab^{CH1-CLx} antibody agent encoded by one or more polyribonucleotides as described herein comprises a CH3 domain comprising one or more mutations selected from: S354C and T366W (according to EU numbering). This combination of CH3 mutations is referred to herein as “cak”.

[0471] In some embodiments, a polyribonucleotide encodes a CH3 domain that comprises one of the following substitution mutations: M428, N434S, or a combination thereof (e.g., an “L/S” mutation). In some embodiments, a polyribonucleotide comprises a CH3 ribonucleic acid sequence that comprises any one of SEQ ID NOs: 75 and 78. In some embodiments, a polyribonucleotide encodes a CH3 domain that comprises one of the following substitution mutations: Y349C, T366S, L368A, and Y407V (according to EU numbering). In some embodiments, a polyribonucleotide comprises a ribonucleic acid sequence according to SEQ ID NO: 81 and 84. In some embodiments, a polyribonucleotide encodes a CH3 domain that comprises one of the following substitution mutations: S354C and T366W (according to EU numbering). In some embodiments, a polyribonucleotide comprises a ribonucleic acid sequence according to SEQ ID NO: 87 and 90.

[0472] In some embodiments, a polyribonucleotide encodes an immunoglobulin chain that VH domain operably linked to one or more constant domains, where the one or more constant domains comprise a CH3 domain. In some embodiments, a polyribonucleotide comprises a ribonucleic acid sequence according to SEQ ID NO: 69. In some embodiments, polyribonucleotide comprises a CH3 ribonucleic acid sequence that encodes the CH3 domain that comprises a G1m3, G1m17, or a Glm17,1 allotype. In some embodiments, a polyribonucleotide comprises a CH3 ribonucleic acid sequence that comprises any one of SEQ ID NOs: 69 and 72.

[0473] In some embodiments, a CrossMab^{CH1-CLx} antibody agent encoded by one or more polyribonucleotides as described herein comprises a light chain constant domain. In some embodiments, a light chain constant domain comprises a kappa light chain constant domain. In some embodiments, a CrossMab^{CH1-CLx} antibody agent encoded by one or more polyribonucleotides as described herein comprises a kappa light chain constant domain having an amino acid sequence at least 80, 85, 90%, 91%, 92%, 93%, 94%, 95%, 96%, 97%, 98%, or 99% identical to SEQ ID NO: 92. In some embodiments, a CrossMab^{CH1-CLx} antibody agent encoded by one or more polyribonucleotides as described herein comprises a kappa light chain constant domain having an amino acid sequence represented in SEQ ID NO: 92. In some embodiments, a CrossMab^{CH1-CLx} antibody agent encoded by one or more polyribonucleotides as described herein comprises a lambda chain variable domain.

[0474] In some embodiments, a CrossMab^{CH1-CLx} antibody agent encoded by one or more polyribonucleotides as described herein comprises a hinge domain. In some embodiments, a CrossMab^{CH1-CLx} antibody agent encoded by one or more polyribonucleotides as described herein comprises a hinge domain that comprises an amino acid sequence represented in SEQ ID NO: 104 (herein referred to as “hinge” in Tables 2 and 4).

[0475] In some embodiments, a polyribonucleotide encodes a hinge domain. In some embodiments, a polyribonucleotide encodes a hinge ribonucleic acid sequence that represented in SEQ ID NO: 105. In some embodiments, a polyribonucleotide encodes a hinge domain that comprises an amino acid modification that comprises a deletion of one or more amino acid residues. In some embodiments, a polyribonucleotide encodes a hinge domain an amino acid modification that comprises a deletion of amino acid residues EPKSC in a conventional Ig hinge domain (represented in SEQ ID NO: 104). Such a modification is referred to herein as “Hinge_del” or “ΔEPKSC”. In some embodiments, a polyribonucleotide encodes a hinge ribonucleic acid sequence represented in SEQ ID NO: 111. In some embodiments, a polyribonucleotide encodes a hinge domain that comprises an amino acid modification that comprises a C220S mutation (according to EU numbering). Such a mutated hinge domain is referred to herein as “Hinge_S” or “C/S”. In some embodiments, a polyribonucleotide encodes a hinge ribonucleic acid sequence represented in SEQ ID NO: 108.

[0476] In some embodiments, a CrossMab^{CH1-CLx} antibody agent encoded by one or more polyribonucleotides as described herein comprises a CH2 domain. In some embodiments, a CrossMab^{CH1-CLx} antibody agent encoded by one or more polyribonucleotides as described herein comprises a CH2 domain having an amino acid sequence at least 90%, 91%, 92%, 93%, 94%, 95%, 96%, 97%, 98%, or 99% identical to represented in SEQ ID NO: 53. In some embodiments, a CrossMab^{CH1-CLx} antibody agent encoded by one or more polyribonucleotides as described herein comprises a CH2 domain having an amino acid sequence represented in SEQ ID NO: 53.

[0477] In some embodiments, a CrossMab^{CH1-CLx} antibody agent encoded by one or more polyribonucleotides as described herein comprises a CH2 domain having one or more mutations (e.g., with respect to SEQ ID NO: 53). For example, in some embodiments, a CrossMab^{CH1-CLx} antibody agent encoded by one or more polyribonucleotides as described herein comprises one or more of the following mutations: G236A, A330L, and I332E (according to EU numbering). Such a combination of mutations is referred to herein as “GAALIE”. Such mutations in the CH2 domain have been associated with increased affinity to Fc receptors FcgRIIA and FcgRIII for enhanced antibody effector function.

[0478] In some embodiments, a CrossMab^{CH1-CLx} antibody agent encoded by one or more polyribonucleotides as described herein comprises a CH2 domain having an amino acid sequence that is at least 90%, 91%, 92%, 93%, 94%, 95%, 96%, 97%, 98%, or 99% identical to SEQ ID NO: 56. In some embodiments, a CrossMab^{CH1-CLx} antibody agent encoded by one or more polyribonucleotides as described herein comprises a CH2 domain having an amino acid sequence represented in SEQ ID NO: 56.

[0479] In some embodiments, a CrossMab^{CH1-CLx} antibody agent encoded by one or more polyribonucleotides as described herein comprises one or more mutations selected from: G236A and I332E (according to EU numbering). Such a combination of CH2 mutations is referred to herein as “GAIE”. In some embodiments, a CrossMab^{CH1-CLx} antibody agent encoded by one or more polyribonucleotides as described herein comprises a CH2 domain having an amino acid sequence at least 90%, 91%, 92%, 93%, 94%, 95%, 96%, 97%, 98%, or 99% identical to SEQ ID NO: 59. In some embodiments, a CrossMab^{CH1-CLx} antibody agent encoded by one or more polyribonucleotides as described herein comprises a CH2 domain having an amino acid sequence represented in SEQ ID NO: 59.

[0480] In some embodiments, a CrossMab^{CH1-CLx} antibody agent encoded by one or more polyribonucleotides as described herein comprises a mutation: G236A (according to EU numbering), referred to herein as “GA”. In some embodiments, a CrossMab^{CH1-CLx} antibody agent encoded by one or more polyribonucleotides as described herein comprises a CH2 domain having an amino acid sequence at least 90%, 91%, 92%, 93%, 94%, 95%, 96%, 97%, 98%, or 99% identical to SEQ ID NO: 62. In some embodiments, a CrossMab^{CH1-CLx} antibody agent encoded by one or more polyribonucleotides as described herein comprises a CH2 domain having an amino acid sequence represented in SEQ ID NO: 62.

[0481] In some embodiments, a CrossMab^{CH1-CLx} antibody agent encoded by one or more polyribonucleotides as described herein comprises a mutation: I332E (according to EU numbering), referred to herein as “IE”. In some embodiments, a CrossMab^{CH1-CLx} antibody agent encoded by one or more polyribonucleotides as described herein comprises a CH2 domain having an amino acid sequence at least 90%, 91%, 92%, 93%, 94%, 95%, 96%, 97%, 98%, or 99% identical to SEQ ID NO: 65. In some embodiments, a CrossMab^{CH1-CLx} antibody agent encoded by one or more polyribonucleotides as described herein comprises a CH2 domain having an amino acid sequence represented in SEQ ID NO: 65.

[0482] In some embodiments, a polyribonucleotide encodes an immunoglobulin chain that comprises a VH domain operably linked to one or more constant domains, wherein the one or more constant domains comprise a CH2 domain. In some embodiments, a polyribonucleotide comprises a ribonucleic acid sequence that according to SEQ ID NO: 54. In some embodiments, a CH2 ribonucleic acid encodes a CH2 domain with one or more amino acid substitution mutations. For example, in some embodiments, a CH2 ribonucleic acid sequence encodes one or more of the following mutations: G236A, A330L, and I332E (according to EU numbering), referred to herein as “GAALIE”. Such mutations in the CH2 domain have been associated with increased affinity to Fc receptors FcgRIIA and FcgRIII for enhanced antibody effector function. In some embodiments, a CH2 ribonucleic sequence comprises or consists of a sequence according to SEQ ID NO: 57. In some embodiments, a CH2 ribonucleic acid sequence encodes the one or more of the following mutation: G236A and I332E (according to EU numbering), referred to herein as “GAIE”. In some embodiments, a CH2 ribonucleic sequence comprises of a sequence according to SEQ ID NO: 60. In some embodiments, a CH2 ribonucleic acid sequence encodes the mutation G236A (according to EU numbering), referred to herein as “GA”. In some embodiments, a CH2 ribonucleic sequence comprises of a sequence according to SEQ ID NO: 63. In some embodiments, a CH2 ribonucleic acid sequence encodes the mutation: I332E (according to EU numbering), referred to herein as “IE”. In some embodiments, a CH2 ribonucleic sequence comprises of a sequence according to SEQ ID NO: 66. In some embodiments, a CH2 ribonucleic acid sequence encodes a CH2 domain that comprises a E294 deletion (according to EU numbering), referred to herein as “E294del”.

[0483] In some embodiments, a CrossMab^{CH1-CLx} antibody agent encoded by one or more polyribonucleotides as described herein comprises a CH1 domain. In some embodiments, a CrossMab^{CH1-CLx} antibody agent encoded by one or more polyribonucleotides as described herein comprises a CH1 domain that comprises a G1m3 allotype. In some embodiments, a CrossMab^{CH1-CLx} antibody agent encoded by one or more polyribonucleotides as described herein comprises a CH1 domain that comprises a G1m17 allotype. In some embodiments, a CrossMab^{CH1-CLx} antibody agent encoded by one or more polyribonucleotides as described herein comprises a CH1 domain that comprises an amino acid represented in SEQ ID NO: 38 or 41.

[0484] In some embodiments, a polyribonucleotide encodes an immunoglobulin chain that comprises a VH domain operably linked to one or more constant domains, where the one or more constant domains comprise a CH1 domain. In some embodiments, a polyribonucleotide comprises a CH1 ribonucleic acid sequence according to SEQ ID NO: 39. In some embodiments, a polyribonucleotide encodes a CH1 domain that comprises a G1m3 allotype. In some embodiments, a polyribonucleotide encodes a CH1 domain that comprises a G1m17 allotype. In some embodiments, a polyribonucleotide encodes a CH1 ribonucleic acid sequence according to SEQ ID NO: 39 or 42.

[0485] In some embodiments, a polyribonucleotide encodes a CH1 domain that comprises one or more mutations. In some embodiments, a polyribonucleotide encodes a CH1 domain that comprises the addition of one or more serine residues. In some embodiments, a polyribonucleotide encodes a CH1 domain that comprises addition of two additional serine residues (referred to herein as “SS”). In some embodiments, a polyribonucleotide encodes a CH1 ribonucleic acid sequence that is at least 90%, 91%, 92%, 93%, 94%, 95%, 96%, 97%, 98%, or 99% identical to SEQ ID NO: 45 or 48 In some embodiments, a polyribonucleotide encodes a CH1 ribonucleic acid sequence represented in SEQ ID NO: 45 or 48. In some embodiments, a polyribonucleotide encodes a CH1 domain that comprises one or more charge variant mutations. In some embodiments, a polyribonucleotide encodes a CH1 domain comprising one or more substitution mutations selected from: K147E, K213D, or a combination thereof. In some embodiments, a polyribonucleotide encodes a CH1 ribonucleic acid sequence that has at least 90%, 91%, 92%, 93%, 94%, 95%, 96%, 97%, 98%, or 99% sequence identity to SEQ ID NO: 51 or 866. In some embodiments, a polyribonucleotide encodes a CH1 ribonucleic acid sequence according to SEQ ID NO: 51 or 866.

[0486] In some embodiments, a CrossMab^{CH1-CLx} antibody agent encoded by one or more polyribonucleotides as described herein comprises a signal peptide comprising a husec2 signal peptide. In some embodiments, a CrossMab^{CH1-CLx} antibody agent encoded by one or more polyribonucleotides as described herein comprises a signal peptide comprising SEQ ID NO: 1.

[0487] In some embodiments, a CrossMab^{CH1-CLx} antibody agent encoded by one or more polyribonucleotides as described herein comprises an immunoglobulin chain encoded by a nucleic acid sequence that has at least 80%, 85%, 90%, 91%, 92%, 93%, 94%, 95%, 96%, 97%, 98%, or 99% sequence identity to a sequence represented by SEQ ID NOs: 161-208 (heavy chain) and SEQ ID NOs: 450 and 451 (light chain). In some embodiments, a CrossMab^{CH1-CLx} antibody agent encoded by one or more polyribonucleotides as described herein comprises an immunoglobulin chain encoded by a nucleic acid sequence represented by any one of SEQ ID NOs: 161-208 (heavy chain) and SEQ ID NOs: 450 and 451 (light chain).

[0488] In some embodiments, a CrossMab^{CH1-CLx} antibody agent encoded by one or more polyribonucleotides as described herein comprises an immunoglobulin chain encoded by a nucleic acid sequence that has at least 80%, 85%, 90%, 91%, 92%, 93%, 94%, 95%, 96%, 97%, 98%, or 99% sequence identity to a sequence represented by SEQ ID NO: 628 (heavy chain) and/or SEQ ID NOs: 631 (light chain). In some embodiments, a CrossMab^{CH1-CLx} comprises an immunoglobulin chain represented by SEQ ID NO: 628 (heavy chain) and/or SEQ ID NOs: 631 (light chain).

[0489] In some embodiments, a CrossMab^{CH1-CLx} antibody agent encoded by one or more polyribonucleotides as described herein comprises an immunoglobulin chain (e.g., an immunoglobulin heavy chain) that comprises an amino acid sequence that has at least 80%, 85%, 90%, 91%, 92%, 93%, 94%, 95%, 96%, 97%, 98%, or 99% sequence identity to a sequence represented by SEQ ID NOs: 629. In some embodiments, a CrossMab^{CH1-CLx} antibody agent encoded by one or more polyribonucleotides as described herein comprises an immunoglobulin chain (e.g., an immunoglobulin heavy chain) that comprises an amino acid sequence represented by any one of SEQ ID NOs: 629. In some embodiments, a CrossMab^{CH1-CLx} antibody agent encoded by one or more polyribonucleotides as described herein comprises an immunoglobulin chain (e.g., an immunoglobulin light chain) that comprises an amino acid sequence that has at least at least 80%, 85%, 90%, 91%, 92%, 93%, 94%, 95%, 96%, 97%, 98%, or 99% sequence identity to SEQ ID NO: 632. In some embodiments, a CrossMab^{CH1-CLx} antibody agent encoded by one or more polyribonucleotides as described herein comprises an immunoglobulin chain (e.g., an immunoglobulin light chain) that comprises an amino acid sequence represented by SEQ ID NO: 632.Exemplary heavy chain and light chain configurations of a CrossMab^{CH1-CLx} antibody agent, as described herein, are shown in Table 3 below.

TABLE 3
Exemplary CrossMab^{CH1-CLx} Chain Configurations

| CrossMab^{CH1-CLx} format | | | | | | |
|---|---|---|---|---|---|---|
| Heavy Chain | Allotype | VH | CL | Hinge | CH2 | CH3 |
| 1-18 VH G1m3 | G1m3 | 1-18 | Ck_ASE | Hinge_del | CH2 | CH3_G1m3/17 |
| Ck(AS/Q124E) del216- | | | | | | |
| 220 | | | | | | |
| 1-18 VH G1m3 | G1m3 | 1-18 | Ck_ASE | Hinge_del | CH2 | CH3_LS_G1m3/17 |
| Ck(AS/Q124E) del216- | | | | | | |
| 220 LS | | | | | | |
| 1-18 VH G1m3 | G1m3 | 1-18 | Ck_ASE | Hinge_del | CH2_GAALIE | CH3_LS_G1m3/17 |
| Ck(AS/Q124E) del216- | | | | | | |
| 220 GAALIE LS | | | | | | |
| 1-18 VH G1m3 | G1m3 | 1-18 | Ck_ASE | Hinge_del | CH2_GAIE | CH3_LS_G1m3/17 |
| Ck(AS/Q124E) del216- | | | | | | |
| 220 GAIE LS | | | | | | |
| 1-18 VH G1m3 | G1m3 | 1-18 | Ck_ASE | Hinge_del | CH2_GA | CH3_LS_G1m3/17 |
| Ck(AS/Q124E) del216- | | | | | | |
| 220 GA LS | | | | | | |
| 1-18 VH G1m3 | G1m3 | 1-18 | Ck_ASE | Hinge_del | CH2_IE | CH3_LS_G1m3/17 |
| Ck(AS/Q124E) del216- | | | | | | |
| 220 IE LS | | | | | | |
| 1-18 VH G1m3 | G1m3 | 1-18 | Ck_ASE | Hinge_del | CH2 | CH3_cah_LS_G1m3/17 |
| Ck(AS/Q124E) del216- | | | | | | |
| 220 cah LS | | | | | | |
| 1-18 VH G1m3 | G1m3 | 1-18 | Ck_ASE | Hinge_del | CH2_GAALIE | CH3_cah_LS_G1m3/17 |
| Ck(AS/Q124E) del216- | | | | | | |
| 220 GAALIE cah LS | | | | | | |
| 1-18 VH G1m3 | G1m3 | 1-18 | Ck_ASE | Hinge_del | CH2_GAIE | CH3_cah_LS_G1m3/17 |
| Ck(AS/Q124E) del216- | | | | | | |
| 220 GAIE cah LS | | | | | | |
| 1-18 VH G1m3 | G1m3 | 1-18 | Ck_ASE | Hinge_del | CH2_GA | CH3_cah_LS_G1m3/17 |
| Ck(AS/Q124E) del216- | | | | | | |
| 220 GA cah LS | | | | | | |
| 1-18 VH G1m3 | G1m3 | 1-18 | Ck_ASE | Hinge_del | CH2_IE | CH3_cah_LS_G1m3/17 |
| Ck(AS/Q124E) del216- | | | | | | |
| 220 IE cah LS | | | | | | |
| 1-18 VH G1m3 | G1m3 | 1-18 | Ck_ASE | Hinge_del | CH2 | CH3_cak_LS_G1m3/17 |
| Ck(AS/Q124E) del216- | | | | | | |
| 220 cak LS | | | | | | |
| 1-18 VH G1m3 | G1m3 | 1-18 | Ck_ASE | Hinge_del | CH2_GAALIE | CH3_cak_LS_G1m3/17 |
| Ck(AS/Q124E) del216- | | | | | | |
| 220 GAALIE cak LS | | | | | | |
| 1-18 VH G1m3 | G1m3 | 1-18 | Ck_ASE | Hinge_del | CH2_GAIE | CH3_cak_LS_G1m3/17 |
| Ck(AS/Q124E) del216- | | | | | | |
| 220 GAIE cak LS | | | | | | |
| 1-18 VH G1m3 | G1m3 | 1-18 | Ck_ASE | Hinge_del | CH2_GA | CH3_cak_LS_G1m3/17 |
| Ck(AS/Q124E) del216- | | | | | | |
| 220 GA cak LS | | | | | | |
| 1-18 VH G1m3 | G1m3 | 1-18 | Ck_ASE | Hinge_del | CH2_IE | CH3_cak_LS_G1m3/17 |
| Ck(AS/Q124E) del216- | | | | | | |
| 220 IE cak LS | | | | | | |
| 1-18 VH G1m17 | G1m17 | 1-18 | Ck_ASE | Hinge_del | CH2 | CH3_G1m3/17 |
| Ck(AS/Q124E) del216- | | | | | | |
| 220 | | | | | | |
| 1-18 VH G1m17 | G1m17 | 1-18 | Ck_ASE | Hinge_del | CH2 | CH3_LS_G1m3/17 |
| Ck(AS/Q124E) del216- | | | | | | |
| 220 LS | | | | | | |
| 1-18 VH G1m17 | G1m17 | 1-18 | Ck_ASE | Hinge_del | CH2_GAALIE | CH3_LS_G1m3/17 |
| Ck(AS/Q124E) del216- | | | | | | |
| 220 GAALIE LS | | | | | | |
| 1-18 VH G1m17 | G1m17 | 1-18 | Ck_ASE | Hinge_del | CH2_GAIE | CH3_LS_G1m3/17 |
| Ck(AS/Q124E) del216- | | | | | | |
| 220 GAIE LS | | | | | | |
| 1-18 VH G1m17 | G1m17 | 1-18 | Ck_ASE | Hinge_del | CH2_GA | CH3_LS_G1m3/17 |
| Ck(AS/Q124E) del216- | | | | | | |
| 220 GA LS | | | | | | |
| 1-18 VH G1m17 | G1m17 | 1-18 | Ck_ASE | Hinge_del | CH2_IE | CH3_LS_G1m3/17 |
| Ck(AS/Q124E) del216- | | | | | | |
| 220 IE LS | | | | | | |
| 1-18 VH G1m17 | G1m17 | 1-18 | Ck_ASE | Hinge_del | CH2 | CH3_cah_LS_G1m3/17 |
| Ck(AS/Q124E) del216- | | | | | | |
| 220 cah LS | | | | | | |
| 1-18 VH G1m17 | G1m17 | 1-18 | Ck_ASE | Hinge_del | CH2_GAALIE | CH3_cah_LS_G1m3/17 |
| Ck(AS/Q124E) del216- | | | | | | |
| 220 GAALIE cah LS | | | | | | |
| 1-18 VH G1m17 | G1m17 | 1-18 | Ck_ASE | Hinge_del | CH2_GAIE | CH3_cah_LS_G1m3/17 |
| Ck(AS/Q124E) del216- | | | | | | |
| 220 GAIE cah LS | | | | | | |
| 1-18 VH G1m17 | G1m17 | 1-18 | Ck_ASE | Hinge_del | CH2_GA | CH3_cah_LS_G1m3/17 |
| Ck(AS/Q124E) del216- | | | | | | |
| 220 GA cah LS | | | | | | |
| 1-18 VH G1m17 | G1m17 | 1-18 | Ck_ASE | Hinge_del | CH2_IE | CH3_cah_LS_G1m3/17 |
| Ck(AS/Q124E) del216- | | | | | | |
| 220 IE cah LS | | | | | | |
| 1-18 VH G1m17 | G1m17 | 1-18 | Ck_ASE | Hinge_del | CH2 | CH3_cak_LS_G1m3/17 |
| Ck(AS/Q124E) del216- | | | | | | |
| 220 cak LS | | | | | | |
| 1-18 VH G1m17 | G1m17 | 1-18 | Ck_ASE | Hinge_del | CH2_GAALIE | CH3_cak_LS_G1m3/17 |
| Ck(AS/Q124E) del216- | | | | | | |
| 220 GAALIE cak LS | | | | | | |
| 1-18 VH G1m17 | G1m17 | 1-18 | Ck_ASE | Hinge_del | CH2_GAIE | CH3_cak_LS_G1m3/17 |
| Ck(AS/Q124E) del216- | | | | | | |
| 220 GAIE cak LS | | | | | | |
| 1-18 VH G1m17 | G1m17 | 1-18 | Ck_ASE | Hinge_del | CH2_GA | CH3_cak_LS_G1m3/17 |
| Ck(AS/Q124E) del216- | | | | | | |
| 220 GA cak LS | | | | | | |
| 1-18 VH G1m17 | G1m17 | 1-18 | Ck_ASE | Hinge_del | CH2_IE | CH3_cak_LS_G1m3/17 |
| Ck(AS/Q124E) del216- | | | | | | |
| 220 IE cak LS | | | | | | |
| 1-18 VH G1m17, 1 | G1m17, 1 | 1-18 | Ck_ASE | Hinge_del | CH2 | CH3_G1m17, 1 |
| Ck(AS/Q124E) del216- | | | | | | |
| 220 | | | | | | |
| 1-18 VH G1m17, 1 | G1m17, 1 | 1-18 | Ck_ASE | Hinge_del | CH2 | CH3_LS_G1m17, 1 |
| Ck(AS/Q124E) del216- | | | | | | |
| 220 LS | | | | | | |
| 1-18 VH G1m17, 1 | G1m17, 1 | 1-18 | Ck_ASE | Hinge_del | CH2_GAALIE | CH3_LS_G1m17, 1 |
| Ck(AS/Q124E) del216- | | | | | | |
| 220 GAALIE LS | | | | | | |
| 1-18 VH G1m17, 1 | G1m17, 1 | 1-18 | Ck_ASE | Hinge_del | CH2_GAIE | CH3_LS_G1m17, 1 |
| Ck(AS/Q124E) del216- | | | | | | |
| 220 GAIE LS | | | | | | |
| 1-18 VH G1m17, 1 | G1m17, 1 | 1-18 | Ck_ASE | Hinge_del | CH2_GA | CH3_LS_G1m17, 1 |
| Ck(AS/Q124E) del216- | | | | | | |
| 220 GA LS | | | | | | |
| 1-18 VH G1m17, 1 | G1m17, 1 | 1-18 | Ck_ASE | Hinge_del | CH2_IE | CH3_LS_G1m17, 1 |
| Ck(AS/Q124E) del216- | | | | | | |
| 220 IE LS | | | | | | |
| 1-18 VH G1m17, 1 | G1m17, 1 | 1-18 | Ck_ASE | Hinge_del | CH2 | CH3_cah_LS_G1m17, 1 |
| Ck(AS/Q124E) del216- | | | | | | |
| 220 cah LS | | | | | | |
| 1-18 VH G1m17, 1 | G1m17, 1 | 1-18 | Ck_ASE | Hinge_del | CH2_GAALIE | CH3_cah_LS_G1m17, 1 |
| Ck(AS/Q124E) del216- | | | | | | |
| 220 GAALIE cah LS | | | | | | |
| 1-18 VH G1m17, 1 | G1m17, 1 | 1-18 | Ck_ASE | Hinge_del | CH2_GAIE | CH3_cah_LS_G1m17, 1 |
| Ck(AS/Q124E) del216- | | | | | | |
| 220 GAIE cah LS | | | | | | |
| 1-18 VH G1m17, 1 | G1m17, 1 | 1-18 | Ck_ASE | Hinge_del | CH2_GA | CH3_cah_LS_G1m17, 1 |
| Ck(AS/Q124E) del216- | | | | | | |
| 220 GA cah LS | | | | | | |
| 1-18 VH G1m17, 1 | G1m17, 1 | 1-18 | Ck_ASE | Hinge_del | CH2_IE | CH3_cah_LS_G1m17, 1 |
| Ck(AS/Q124E) del216- | | | | | | |
| 220 IE cah LS | | | | | | |
| 1-18 VH G1m17, 1 | G1m17, 1 | 1-18 | Ck_ASE | Hinge_del | CH2 | CH3_cak_LS_G1m17, 1 |
| Ck(AS/Q124E) del216- | | | | | | |
| 220 cak LS | | | | | | |
| 1-18 VH G1m17, 1 | G1m17, 1 | 1-18 | Ck_ASE | Hinge_del | CH2_GAALIE | CH3_cak_LS_G1m17, 1 |
| Ck(AS/Q124E) del216- | | | | | | |
| 220 GAALIE cak LS | | | | | | |
| 1-18 VH G1m17, 1 | G1m17, 1 | 1-18 | Ck_ASE | Hinge_del | CH2_GAIE | CH3_cak_LS_G1m17, 1 |
| Ck(AS/Q124E) del216- | | | | | | |
| 220 GAIE cak LS | | | | | | |
| 1-18 VH G1m17, 1 | G1m17, 1 | 1-18 | Ck_ASE | Hinge_del | CH2_GA | CH3_cak_LS_G1m17, 1 |
| Ck(AS/Q124E) del216- | | | | | | |
| 220 GA cak LS | | | | | | |
| 1-18 VH G1m17, 1 | G1m17, 1 | 1-18 | Ck_ASE | Hinge_del | CH2_IE | CH3_cak_LS_G1m17, 1 |
| Ck(AS/Q124E) del216- | | | | | | |
| 220 IE cak LS | | | | | | |
| CrossMabCH1-CLx | | | | | | |
| format Light Chain | Allotype | VL | CH1 | — | — | — |
| 1-18 VL CH1(SS) | G1m3 | 1-18 | CH1(SS) | — | — | — |
| (G1m3) | | | (G1m3) | | | |
| 1-18 VL CH1(SS) | G1m17±, 1 | 1-18 | CH1(SS) | — | — | — |
| (G1m17±, 1) | | | (G1m17±, 1) | | | |

### C. CrossMab^{CH1-CLcv}

[0490] In some embodiments, antibody agents as described herein are in a format where one or more charge variants (cv) are introduced into a domain (e.g., a constant domain, e.g., a CH1 domain, a CL domain, or a combination thereof). Such formats are referred to herein as “CrossMab^{CH1-CLcv}” or “CH1-cv”. In some embodiments, such antibody agents include charge variants in both arms of the antibody (see e.g., FIG. 4C). Exemplary charge variants are described e.g., in WO2017055539 A1, which is herein incorporated by reference in its entirety. In some embodiments, in contrast to the formats described in WO2017055539 A1, CH1-cv antibody agents described do not include a swap of the antibody CH1 and CL domains in either arm of the antibody.

[0491] In some embodiments, a charge variant (cv) is introduced into a CH1 and/or CL domain of an antibody agent in order to prevent mispairing of immunoglobulin chains of an antibody agent. Such charge variants may include, for example, introducing one or more positively charged amino acid residues in a CH1 domain and one or more negatively charged amino acid residues in the CL, or vice versa, at specific positions in the CH1 and CL interface.

[0492] In some embodiments, a polyribonucleotide may encode a heavy chain and/or light chain of a CrossMab^{CH1-CLcv} antibody agent as described herein.

[0493] In some embodiments, a CrossMab^{CH1-CLcv} antibody agent may be encoded by two separate polyribonucleotide: a first polyribonucleotide comprising a coding region that encodes (in 5′ to 3′ order): a heavy chain variable domain (VH), a CH1 domain that includes one or more charge variants as described herein, a hinge region, a CH2 domain, and a CH3 domain (see e.g., FIG. 10A); and a second polyribonucleotide comprising a coding region that encodes (in 5′ to 3′ order): a light chain variable domain (VL) and a light chain constant domain (CL) that includes one or more charge variants as described herein (see e.g., FIG. 10B).

[0494] In some embodiments, a CrossMab^{CH1-CLcv} antibody agent comprises a first immunoglobulin chain, wherein the first immunoglobulin chain comprises a CL domain and the CL domain an amino acid at position 123 (EU numbering) that is substituted by an amino acid selected from K, R and H. In some embodiments, a CrossMab^{CH1-CLcv} antibody agent comprises a first immunoglobulin chain, wherein the first immunoglobulin chain comprises a CL domain and the CL domain an amino acid at position 124 (EU numbering) that is substituted by an amino acid selected from K, R and H. In some embodiments, a CrossMab^{CH1-CLcv} antibody agent comprises a second immunoglobulin chain, wherein the second immunoglobulin chain comprises a CH1 domain having an amino acid at position 147 (EU numbering) that is substituted by an amino acid selected from E or D (see WO2017055539A1, which is herein incorporated by reference in its entirety).

[0495] In some embodiments, a CrossMab^{CH1-CLcv} antibody agent encoded by one or more polyribonucleotides as described herein comprises a CH1 domain that comprises one or more charge variant mutations. In some embodiments, a CrossMab^{CH1-CLcv} antibody agent comprises a CH1 domain, wherein the CH1 domain comprises one or more substitutions including K147E, K213D, or a combination thereof. In some embodiments, a CrossMab^{CH1-CLcv} antibody agent comprises a CH1 domain that has at least 90%, 91%, 92%, 93%, 94%, 95%, 96%, 97%, 98%, or 99% sequence identity to SEQ ID NO: 50 or 865. In some embodiments, a CrossMab^{CH1-CLcv} antibody agent comprises a CH1 domain having an amino acid sequence according to SEQ ID NO: 50 or 865. In some embodiments, a CrossMab^{CH1-CLcv} antibody agent comprises a CH1 domain that comprises a G1m3 allotype. In some embodiments, a CrossMab^{CH1-CLcv} antibody agent comprises a CH1 domain that comprises a G1m17 allotype.

[0496] In some embodiments, a CrossMab^{CH1-CLcv} antibody agent encoded by one or more polyribonucleotides as described herein comprises a heavy chain encoded by a nucleic acid sequence that has at least 80%, 85%, 90%, 91%, 92%, 93%, 94%, 95%, 96%, 97%, 98%, or 99% sequence identity to a sequence represented by SEQ ID NO: 209-256. In some embodiments, a CrossMab^{CH1-CLcv} antibody agent comprises a heavy chain encoded by a nucleic acid sequence represented by any one of SEQ ID NOs: 209-256. In some embodiments, a CrossMab^{CH1-CLcv} antibody agent comprises a light chain encoded by a nucleic acid sequence that has at least at least 80%, 85%, 90%, 91%, 92%, 93%, 94%, 95%, 96%, 97%, 98%, or 99% sequence identity to SEQ ID NO: 452 or 453. In some embodiments, a CrossMab^{CH1-CLcv} antibody agent comprises a light chain encoded by a nucleic acid sequence represented in SEQ ID NO: 452 or 453.

[0497] In some embodiments, a CrossMab^{CH1-CLcv} antibody agent comprises a heavy chain variable domain comprising: (i) HCDR1 (DDPYTDDDTFTKYW; SEQ ID NO: 6); (ii) HCDR2 (ISPHFARP; SEQ ID NO: 9); (iii) HCDR3 (ARDPFGDRAPHYNYHMDV; SEQ ID NO: 12); or (iv) a combination thereof. In some embodiments, a CrossMab^{CH1-CLcv} antibody agent comprises a heavy chain variable domain comprising: (i) HCDR1 (DDPYTDDDTFTKYW; SEQ ID NO: 6); (ii) HCDR2 (ISPHFARP; SEQ ID NO: 9); and (iii) HCDR3 (ARDPFGDRAPHYNYHMDV; SEQ ID NO: 12). In some embodiments, a CrossMab^{CH1-CLcv} antibody agent comprises a light chain variable domain comprising: (i) LCDR1 (QGLDSSH; SEQ ID NO: 15); (ii) LCDR2 (GTS; SEQ ID NO: 18); (iii) LCDR3 (QRYGGTPIT; SEQ ID NO: 21); or (iv) a combination thereof. In some embodiments, a CrossMab^{CH1-CLcv} antibody agent comprises a light chain variable domain comprising: (i) LCDR1 (QGLDSSH; SEQ ID NO: 15); (ii) LCDR2 (GTS; SEQ ID NO: 18); and (iii) LCDR3 (QRYGGTPIT; SEQ ID NO: 21). In some embodiments, a CrossMab^{CH1-CLcv} antibody agent comprises (a) a heavy chain variable domain comprising: (i) HCDR1 (DDPYTDDDTFTKYW; SEQ ID NO: 6); (ii) HCDR2 (ISPHFARP; SEQ ID NO: 9); (iii) HCDR3 (ARDPFGDRAPHYNYHMDV; SEQ ID NO: 12); or (iv) a combination thereof; and (b) a light chain variable domain comprising: (i) LCDR1 (QGLDSSH; SEQ ID NO: 15); (ii) LCDR2 (GTS; SEQ ID NO: 18); (iii) LCDR3 (QRYGGTPIT; SEQ ID NO: 21); or (iv) a combination thereof. In some embodiments, a CrossMab^{CH1-CLcv} antibody agent comprises (a) a heavy chain variable domain comprising: (i) HCDR1 (DDPYTDDDTFTKYW; SEQ ID NO: 6); (ii) HCDR2 (ISPHFARP; SEQ ID NO: 9); and (iii) HCDR3 (ARDPFGDRAPHYNYHMDV; SEQ ID NO: 12); and (b) a light chain variable domain comprising: (i) LCDR1 (QGLDSSH; SEQ ID NO: 15); (ii) LCDR2 (GTS; SEQ ID NO: 18); and (iii) LCDR3 (QRYGGTPIT; SEQ ID NO: 21).

[0498] In some embodiments, a polyribonucleotide described herein encodes an immunoglobulin chain of a CrossMab^{CH1-CLcv} antibody agent, wherein the immunoglobulin chain comprises a heavy chain variable domain, and wherein the heavy chain variable domain comprises: (i) HCDR1 (DDPYTDDDTFTKYW; SEQ ID NO: 6); (ii) HCDR2 (ISPHFARP; SEQ ID NO: 9); (iii) HCDR3 (ARDPFGDRAPHYNYHMDV; SEQ ID NO: 12); or (iv) a combination thereof. In some embodiments, a polyribonucleotide described herein encodes an immunoglobulin chain of a CrossMab^{CH1-CLcv} antibody agent, wherein the immunoglobulin chain comprises a heavy chain variable domain, and wherein the heavy chain variable domain comprises: (i) HCDR1 (DDPYTDDDTFTKYW; SEQ ID NO: 6); (ii) HCDR2 (ISPHFARP; SEQ ID NO: 9); and (iii) HCDR3 (ARDPFGDRAPHYNYHMDV; SEQ ID NO: 12). In some embodiments, a polyribonucleotide described herein encodes an immunoglobulin chain of a CrossMab^{CH1-CLcv} antibody agent, wherein the immunoglobulin chain comprises a light chain variable domain, and wherein the light chain variable domain comprises: (i) LCDR1 (QGLDSSH; SEQ ID NO: 15); (ii) LCDR2 (GTS; SEQ ID NO: 18); (iii) LCDR3 (QRYGGTPIT; SEQ ID NO: 21); or (iv) a combination thereof. In some embodiments, a polyribonucleotide described herein encodes an immunoglobulin chain of a CrossMab^{CH1-CLcv} antibody agent, wherein the immunoglobulin chain comprises a light chain variable domain, and wherein the light chain variable domain comprises: (i) LCDR1 (QGLDSSH; SEQ ID NO: 15); (ii) LCDR2 (GTS; SEQ ID NO: 18); and (iii) LCDR3 (QRYGGTPIT; SEQ ID NO: 21). In some embodiments, a polyribonucleotide described herein encodes two immunoglobulin chains of a CrossMab^{CH1-CLcv} antibody agent: a first immunoglobulin chain comprising a heavy chain variable domain, wherein the heavy chain variable domain comprises: (i) HCDR1 (DDPYTDDDTFTKYW; SEQ ID NO: 6); (ii) HCDR2 (ISPHFARP; SEQ ID NO: 9); (iii) HCDR3 (ARDPFGDRAPHYNYHMDV; SEQ ID NO: 12); or (iv) a combination thereof; and a second immunoglobulin chain comprising a light chain variable domain, wherein the light chain variable domain comprises: (i) LCDR1 (QGLDSSH; SEQ ID NO: 15); (ii) LCDR2 (GTS; SEQ ID NO: 18); (iii) LCDR3 (QRYGGTPIT; SEQ ID NO: 21); or (iv) a combination thereof. In some embodiments, a polyribonucleotide described herein encodes two immunoglobulin chains of a CrossMab^{CH1-CLcv} antibody agent: a first immunoglobulin chain comprising a heavy chain variable domain, wherein the heavy chain variable domain comprises: (i) HCDR1 (DDPYTDDDTFTKYW; SEQ ID NO: 6); (ii) HCDR2 (ISPHFARP; SEQ ID NO: 9); and (iii) HCDR3 (ARDPFGDRAPHYNYHMDV; SEQ ID NO: 12); and a second immunoglobulin chain comprising a light chain variable domain, wherein the light chain variable domain comprises: (i) LCDR1 (QGLDSSH; SEQ ID NO: 15); (ii) LCDR2 (GTS; SEQ ID NO: 18); and (iii) LCDR3 (QRYGGTPIT; SEQ ID NO: 21).

[0499] In some embodiments, a CrossMab^{CH1-CLcv} antibody agent comprises a heavy chain variable domain having at least 80%, 85%, 90%, 91%, 92%, 93%, 94%, 95%, 96%, 97%, 98%, or 99% sequence identity to an amino acid sequence represented by SEQ ID NO: 24. In some embodiments, a CrossMab^{CH1-CLcv} antibody agent comprises a light chain variable domain having at least 80%, 85%, 90%, 91%, 92%, 93%, 94%, 95%, 96%, 97%, 98%, or 99% identity to an amino acid sequence represented by SEQ ID NO: 29. In some embodiments, a CrossMab^{CH1-CLcv} antibody agent comprises a heavy chain variable domain represented by SEQ ID NO: 24. In some embodiments, a CrossMab^{CH1-CLcv} antibody agent comprises a light chain variable domain represented by SEQ ID NO: 29.

[0500] In some embodiments, a polyribonucleotide described herein encodes an immunoglobulin chain of a CrossMab^{CH1-CLcv} antibody agent, wherein the immunoglobulin chain comprises a heavy chain variable domain having at least 80%, 85%, 90%, 91%, 92%, 93%, 94%, 95%, 96%, 97%, 98%, or 99% sequence identity to an amino acid sequence represented by SEQ ID NO: 24. In some embodiments, a polyribonucleotide described herein encodes an immunoglobulin chain of a CrossMab^{CH1-CLcv} antibody agent, wherein the immunoglobulin chain comprises a light chain variable domain having at least 80%, 85%, 90%, 91%, 92%, 93%, 94%, 95%, 96%, 97%, 98%, or 99% identity to an amino acid sequence represented by SEQ ID NO: 29. In some embodiments, a polyribonucleotide described herein encodes an immunoglobulin chain of a CrossMab^{CH1-CLcv} antibody agent, wherein the immunoglobulin chain comprises a heavy chain variable domain represented by SEQ ID NO: 24. In some embodiments, a polyribonucleotide described herein encodes an immunoglobulin chain of a CrossMab^{CH1-CLcv} antibody agent, wherein the immunoglobulin chain comprises a light chain variable domain represented by SEQ ID NO: 29.

[0501] As described above, CrossMab^{CH1-CLcv} antibody agents encoded by one or more polyribonucleotides as described herein may comprise one or more heavy chain constant domains. In some embodiments, one or more heavy chain constant domains comprise a CH3 domain. In some embodiments, a CrossMab^{CH1-CLcv} antibody agent comprises a CH3 domain that comprises a G1m3, G1m17, or a Glm17,1 allotype. In some embodiments, a CrossMab^{CH1-CLcv} antibody agent comprises a CH3 domain that comprises an amino acid sequence at least 90%, 91%, 92%, 93%, 94%, 95%, 96%, 97%, 98%, or 99% identical to a sequence represented by represented in any one of SEQ ID NOs: 68, 71, 74, 77, 80, 83, 86, or 89. In some embodiments, a CrossMab^{CH1-CLcv} antibody agent comprises a CH3 domain that comprises an amino acid sequence represented in any one of SEQ ID NOs: 68, 71, 74, 77, 80, 83, 86, or 89.

[0502] CrossMab^{CH1-CLcv} antibody agents encoded by one or more polyribonucleotides as described herein may comprise one or more heavy chain constant domains comprising an amino acid modification (e.g., a substitution or deletion) at one or more amino acid positions. In some embodiments, a CrossMab^{CH1-CLcv} antibody agent as described herein may include the L/S mutation within the CH3 region (for enhanced FcRn binding) (see Zalevsky J et al. Nat Biotechnol. 2010, which is herein incorporated by reference). In some embodiments, a CrossMab^{CH1-CLcv} antibody agent comprises an E294 deletion (for Fc hypersialylation) (see Bas M et al. J Immunol 2019, which is herein incorporated by reference).

[0503] In some embodiments, a CrossMab^{CH1-CLcv} antibody agent encoded by one or more polyribonucleotides comprises a CH3 domain comprising one or more of the following mutations: Y349C, T366S, L368A, and Y407V (according to EU numbering). Such a combination of mutations is referred to herein as “cah”. In some embodiments, a CH1-cv antibody agent comprises a CH3 domain comprising one or more mutations selected from: S354C and T366W (according to EU numbering). Such a combination of CH3 mutations is referred to herein as “cak”.

[0504] In some embodiments, a CrossMab^{CH1-CLcv} antibody agent encoded by one or more polyribonucleotides comprises a hinge domain that comprises an amino acid sequence represented in SEQ ID NO: 104.

[0505] In some embodiments, a CrossMab^{CH1-CLcv} antibody agent encoded by one or more polyribonucleotides comprises a CH2 domain that comprises an amino acid sequence at least 90%, 91%, 92%, 93%, 94%, 95%, 96%, 97%, 98%, or 99% identical to represented in SEQ ID NO: 53. In some embodiments, a CH1-cv antibody agent comprises a CH2 domain that comprises an amino acid sequence represented in SEQ ID NO: 53. In some embodiments, a CrossMab^{CH1-CLcv} antibody agent comprises a CH2 domain that comprises one or more mutations (e.g., with respect to SEQ ID NO: 53). For example, in some embodiments, a CrossMab^{CH1-CLcv} antibody agent comprises one or more of the following mutations: G236A, A330L, and I332E (according to EU numbering). Such a combination of mutations is referred to herein as “GAALIE”. Such mutations in the CH2 domain have been associated with increased affinity to Fc receptors FcgRIIA and FcgRIII for enhanced antibody effector function. In some embodiments, a CrossMab^{CH1-CLcv} antibody agent comprises a CH2 domain that comprises an amino acid sequence that is at least 90%, 91%, 92%, 93%, 94%, 95%, 96%, 97%, 98%, or 99% identical to SEQ ID NO: 56. In some embodiments, a CrossMab^{CH1-CLcv} antibody agent comprises a CH2 domain that comprises an amino acid sequence represented in SEQ ID NO: 56. In some embodiments, a CrossMab^{CH1-CLcv} antibody agent comprises a CH2 domain with one or more mutations selected from: G236A and I332E (according to EU numbering). Such a combination of CH2 mutations is referred to herein as “GAIE”. In some embodiments, a CrossMab^{CH1-CLcv} antibody agent comprises a CH2 domain that comprises an amino acid sequence at least 90%, 91%, 92%, 93%, 94%, 95%, 96%, 97%, 98%, or 99% identical to SEQ ID NO: 59. In some embodiments, a CrossMab^{CH1-CLcv} antibody agent comprises a CH2 domain that comprises an amino acid sequence represented in SEQ ID NO: 59. In some embodiments, a CrossMab^{CH1-CLcv} antibody agent comprises a mutation: G236A (according to EU numbering), referred to herein as “GA”. In some embodiments, a CrossMab^{CH1-CLcv} antibody agent comprises a CH2 domain that comprises an amino acid sequence at least 90%, 91%, 92%, 93%, 94%, 95%, 96%, 97%, 98%, or 99% identical to SEQ ID NO: 62. In some embodiments, a CrossMab^{CH1-CLcv} antibody agent comprises a CH₂ domain that comprises an amino acid sequence represented in SEQ ID NO: 62. In some embodiments, a CrossMab^{CH1-CLcv} antibody agent comprises a mutation: I332E (according to EU numbering), referred to herein as “IE”. In some embodiments, a CH1-cv antibody agent comprises a CH2 domain that comprises an amino acid sequence at least 90%, 91%, 92%, 93%, 94%, 95%, 96%, 97%, 98%, or 99% identical to SEQ ID NO: 65. In some embodiments, a CrossMab^{CH1-CLcv} antibody agent comprises a CH2 domain that comprises an amino acid sequence represented in SEQ ID NO: 65.

[0506] In some embodiments, a CrossMab^{CH1-CLcv} antibody agent encoded by one or more polyribonucleotides comprises a signal peptide comprising a husec2 signal peptide. In some embodiments, a CrossMab^{CH1-CLcv} antibody agent comprises a signal peptide comprising SEQ ID NO: 1.

[0507] In some embodiments, a CrossMab^{CH1-CLcv} antibody agent encoded by one or more polyribonucleotides comprises a light chain constant domain that comprises a kappa light chain constant domain. In some embodiments, a CrossMab^{CH1-CLcv} antibody agent comprises a kappa light chain constant domain comprising one or more charge variant mutations. In some embodiments, a CrossMab^{CH1-CLcv} antibody agent comprises one or more charge variants selected from the mutations: a E123K and Q124R (i.e., mutations that impart a positive charge). In some embodiments, a CrossMab^{CH1-CLcv} antibody agent comprises one or more charge variants selected from the mutations: a E123R and Q124K (i.e., mutations that impart a positive charge). Such mutations, when paired with a CH1 domain with mutations that impart a negative charge (e.g., K147E and/or K213D) in the CH1 and CL interface, prevent mispairing between the antibody variable domains of an antibody agent. In some embodiments, a CrossMab^{CH1-CLcv} antibody comprises a kappa light chain constant domain comprising an amino acid sequence at least 80, 85, 90%, 91%, 92%, 93%, 94%, 95%, 96%, 97%, 98%, or 99% identical to SEQ ID NO: 98 or 101. In some embodiments, a CrossMab^{CH1-CLcv} antibody comprises a kappa light chain constant domain comprising an amino acid sequence represented in SEQ ID NO: 98 or 101. In some embodiments, a CrossMab^{CH1-CLcv} antibody agent comprises a lambda light chain constant domain.

[0508] In some embodiments, an antibody agent described herein may be a combination of a CrossMab^{CH1-CLx} and CrossMab^{CH1-CLcv} antibody agent. For example, an antibody agent described herein can include one arm of the antibody that is in a CrossMab^{CH1-CLx} format and a second arm of the antibody in a CrossMab^{CH1-CLcv} format.

[0509] In some embodiments, antibody agents described herein can be designed to include one or more mutations to utilize KIH technology. For example, in some embodiments, a CrossMab^{CH1-CLx} antibody agent as described herein can be designed to further include mutations to utilize KIH technology. In some embodiments, a CrossMab^{CH1-cv} antibody agent as described herein can be designed to further include mutations to utilize KIH technology. In some embodiments, KIH technology may be applied to promote pairing of two different heavy chains, for example, to produce a bispecific and/or bivalent antibody agent. In some embodiments, KIH technology may be applied to promote pairing of two different heavy chains, for example, to produce a bispecific and/or bivalent antibody comprising one arm of the antibody that comprises an immunoglobulin chain of a CrossMab^{CH1-CLx} antibody agent and a second arm that comprises an immunoglobulin chain of a CrossMab^{CH1-cv} antibody agent.

[0510] In some embodiments, a polyribonucleotide encoding a CrossMab^{CH1-CLcv} antibody agent comprises a ribonucleic acid sequence that encodes any one of the immunoglobulin heavy chain configurations in Table 4, corresponding to SEQ ID NOs: 209-256. In some embodiments, a polyribonucleotide encoding a CrossMab^{CH1-CLcv} antibody comprises a ribonucleic acid sequence that encodes any one of the immunoglobulin light chain configurations in Table 4, corresponding to SEQ ID NOs: 452 and 453.

[0511] In some embodiments, a CrossMab^{CH1-CLcv} antibody agent encoded by one or more polyribonucleotides as described herein comprises an immunoglobulin chain (e.g., an immunoglobulin heavy chain) encoded by a nucleic acid sequence that has at least 80%, 85%, 90%, 91%, 92%, 93%, 94%, 95%, 96%, 97%, 98%, or 99% sequence identity to a sequence represented by SEQ ID NO: 634, 640, 643, 646, 649, and 652. In some embodiments, a CrossMab^{CH1-CLcv} antibody agent encoded by one or more polyribonucleotides as described herein comprises an immunoglobulin chain (e.g., an immunoglobulin light chain) encoded by a nucleic acid sequence that has at least 80%, 85%, 90%, 91%, 92%, 93%, 94%, 95%, 96%, 97%, 98%, or 99% sequence identity to a sequence represented by SEQ ID NOs: 637. In some embodiments, a CrossMab^{CH1-CLcv} antibody agent encoded by one or more polyribonucleotides as described herein comprises an immunoglobulin chain (e.g., an immunoglobulin heavy chain) encoded by a nucleic acid sequence represented by SEQ ID NO: 634, 640, 643, 646, 649, and 652. In some embodiments, a CrossMab^{CH1-CLcv} antibody agent encoded by one or more polyribonucleotides as described herein comprises an immunoglobulin chain (e.g., an immunoglobulin light chain) encoded by a nucleic acid sequence represented by SEQ ID NOs: 637.

[0512] In some embodiments, a CrossMab^{CH1-CLcv} antibody agent encoded by one or more polyribonucleotides as described herein comprises an immunoglobulin chain (e.g., an immunoglobulin heavy chain) that comprises an amino acid sequence that has at least 80%, 85%, 90%, 91%, 92%, 93%, 94%, 95%, 96%, 97%, 98%, or 99% sequence identity to a sequence represented by any one of SEQ ID NOs: 635, 641, 644, 647, 650, and 653. In some embodiments, a CrossMab^{CH1-CLcv} antibody agent encoded by one or more polyribonucleotides as described herein comprises an immunoglobulin chain (e.g., an immunoglobulin heavy chain) that comprises an amino acid sequence represented by any one of SEQ ID NOs: 635, 641, 644, 647, 650, and 653. In some embodiments, a CrossMab^{CH1-CLcv} antibody agent encoded by one or more polyribonucleotides as described herein comprises an immunoglobulin chain (e.g., an immunoglobulin light chain) that comprises an amino acid sequence that has at least at least 80%, 85%, 90%, 91%, 92%, 93%, 94%, 95%, 96%, 97%, 98%, or 99% sequence identity to SEQ ID NO: 638. In some embodiments, a CrossMab^{CH1-CLcv} antibody agent encoded by one or more polyribonucleotides as described herein comprises an immunoglobulin chain (e.g., an immunoglobulin light chain) that comprises an amino acid sequence represented by SEQ ID NO: 638.

[0513] Exemplary heavy chain and light chain configurations of a CrossMab^{CH1-CLcv} antibody agent, as described herein, are shown in Table 4 below.

TABLE 4
CrossMab^{CH1-CLcv} Exemplary Chain Configurations

| CrossMab^{CH1-CLcv} Heavy | | | | | | |
|---|---|---|---|---|---|---|
| Chain Formats | Allotype | VH | CH1 | Hinge | CH2 | CH3 |
| 1-18 VH G1m3 | G1m3 | 1-18 | CH1_ED_G1m3 | Hinge | CH2 | CH3_G1m3/17 |
| K147E + K213D | | | | | | |
| 1-18 VH G1m3 | G1m3 | 1-18 | CH1_ED_G1m3 | Hinge | CH2 | CH3_LS_G1m3/17 |
| K147E + K213D LS | | | | | | |
| 1-18 VH G1m3 | G1m3 | 1-18 | CH1_ED_G1m3 | Hinge | CH2_GAALIE | CH3_LS_G1m3/17 |
| K147E + K213D | | | | | | |
| GAALIE LS | | | | | | |
| 1-18 VH G1m3 | G1m3 | 1-18 | CH1_ED_G1m3 | Hinge | CH2_GAIE | CH3_LS_G1m3/17 |
| K147E + K213D | | | | | | |
| GAIE LS | | | | | | |
| 1-18 VH G1m3 | G1m3 | 1-18 | CH1_ED_G1m3 | Hinge | CH2_GA | CH3_LS_G1m3/17 |
| K147E + K213D | | | | | | |
| GA LS | | | | | | |
| 1-18 VH G1m3 | G1m3 | 1-18 | CH1_ED_G1m3 | Hinge | CH2_IE | CH3_LS_G1m3/17 |
| K147E + K213D | | | | | | |
| IE LS | | | | | | |
| 1-18 VH G1m3 | G1m3 | 1-18 | CH1_ED_G1m3 | Hinge | CH2 | CH3_cah_LS_G1m3/17 |
| K147E + K213D | | | | | | |
| cah LS | | | | | | |
| 1-18 VH G1m3 | G1m3 | 1-18 | CH1_ED_G1m3 | Hinge | CH2_GAALIE | CH3_cah_LS_G1m3/17 |
| K147E + K213D | | | | | | |
| GAALIE cah LS | | | | | | |
| 1-18 VH G1m3 | G1m3 | 1-18 | CH1_ED_G1m3 | Hinge | CH2_GAIE | CH3_cah_LS_G1m3/17 |
| K147E + K213D | | | | | | |
| GAIE cah LS | | | | | | |
| 1-18 VH G1m3 | G1m3 | 1-18 | CH1_ED_G1m3 | Hinge | CH2_GA | CH3_cah_LS_G1m3/17 |
| K147E + K213D | | | | | | |
| GA cah LS | | | | | | |
| 1-18 VH G1m3 | G1m3 | 1-18 | CH1_ED_G1m3 | Hinge | CH2_IE | CH3_cah_LS_G1m3/17 |
| K147E + K213D | | | | | | |
| IE cah LS | | | | | | |
| 1-18 VH G1m3 | G1m3 | 1-18 | CH1_ED_G1m3 | Hinge | CH2 | CH3_cak_LS_G1m3/17 |
| K147E + K213D | | | | | | |
| cak LS | | | | | | |
| 1-18 VH G1m3 | G1m3 | 1-18 | CH1_ED_G1m3 | Hinge | CH2_GAALIE | CH3_cak_LS_G1m3/17 |
| K147E + K213D | | | | | | |
| GAALIE cak LS | | | | | | |
| 1-18 VH G1m3 | G1m3 | 1-18 | CH1_ED_G1m3 | Hinge | CH2_GAIE | CH3_cak_LS_G1m3/17 |
| K147E + K213D | | | | | | |
| GAIE cak LS | | | | | | |
| 1-18 VH G1m3 | G1m3 | 1-18 | CH1_ED_G1m3 | Hinge | CH2_GA | CH3_cak_LS_G1m3/17 |
| K147E + K213D | | | | | | |
| GA cak LS | | | | | | |
| 1-18 VH G1m3 | G1m3 | 1-18 | CH1_ED_G1m3 | Hinge | CH2_IE | CH3_cak_LS_G1m3/17 |
| K147E + K213D | | | | | | |
| IE cak LS | | | | | | |
| 1-18 VH G1m17 | G1m17 | 1-18 | CH1_ED_G1m17 | Hinge | CH2 | CH3_G1m3/17 |
| K147E + K213D | | | | | | |
| 1-18 VH G1m17 | G1m17 | 1-18 | CH1_ED_G1m17 | Hinge | CH2 | CH3_LS_G1m3/17 |
| K147E + K213D LS | | | | | | |
| 1-18 VH G1m17 | G1m17 | 1-18 | CH1_ED_G1m17 | Hinge | CH2_GAALIE | CH3_LS_G1m3/17 |
| K147E + K213D | | | | | | |
| GAALIE LS | | | | | | |
| 1-18 VH G1m17 | G1m17 | 1-18 | CH1_ED_G1m17 | Hinge | CH2_GAIE | CH3_LS_G1m3/17 |
| K147E + K213D | | | | | | |
| GAIE LS | | | | | | |
| 1-18 VH G1m17 | G1m17 | 1-18 | CH1_ED_G1m17 | Hinge | CH2_GA | CH3_LS_G1m3/17 |
| K147E + K213D | | | | | | |
| GA LS | | | | | | |
| 1-18 VH G1m17 | G1m17 | 1-18 | CH1_ED_G1m17 | Hinge | CH2_IE | CH3_LS_G1m3/17 |
| K147E + K213D | | | | | | |
| IE LS | | | | | | |
| 1-18 VH G1m17 | G1m17 | 1-18 | CH1_ED_G1m17 | Hinge | CH2 | CH3_cah_LS_G1m3/17 |
| K147E + K213D | | | | | | |
| cah LS | | | | | | |
| 1-18 VH G1m17 | G1m17 | 1-18 | CH1_ED_G1m17 | Hinge | CH2_GAALIE | CH3_cah_LS_G1m3/17 |
| K147E + K213D | | | | | | |
| GAALIE cah LS | | | | | | |
| 1-18 VH G1m17 | G1m17 | 1-18 | CH1_ED_G1m17 | Hinge | CH2_GAIE | CH3_cah_LS_G1m3/17 |
| K147E + K213D | | | | | | |
| GAIE cah LS | | | | | | |
| 1-18 VH G1m17 | G1m17 | 1-18 | CH1_ED_G1m17 | Hinge | CH2_GA | CH3_cah_LS_G1m3/17 |
| K147E + K213D | | | | | | |
| GA cah LS | | | | | | |
| 1-18 VH G1m17 | G1m17 | 1-18 | CH1_ED_G1m17 | Hinge | CH2_IE | CH3_cah_LS_G1m3/17 |
| K147E + K213D | | | | | | |
| IE cah LS | | | | | | |
| 1-18 VH G1m17 | G1m17 | 1-18 | CH1_ED_G1m17 | Hinge | CH2 | CH3_cak_LS_G1m3/17 |
| K147E + K213D | | | | | | |
| cak LS | | | | | | |
| 1-18 VH G1m17 | G1m17 | 1-18 | CH1_ED_G1m17 | Hinge | CH2_GAALIE | CH3_cak_LS_G1m3/17 |
| K147E + K213D | | | | | | |
| GAALIE cak LS | | | | | | |
| 1-18 VH G1m17 | G1m17 | 1-18 | CH1_ED_G1m17 | Hinge | CH2_GAIE | CH3_cak_LS_G1m3/17 |
| K147E + K213D | | | | | | |
| GAIE cak LS | | | | | | |
| 1-18 VH G1m17 | G1m17 | 1-18 | CH1_ED_G1m17 | Hinge | CH2_GA | CH3_cak_LS_G1m3/17 |
| K147E + K213D | | | | | | |
| GA cak LS | | | | | | |
| 1-18 VH G1m17 | G1m17 | 1-18 | CH1_ED_G1m17 | Hinge | CH2_IE | CH3_cak_LS_G1m3/17 |
| K147E + K213D | | | | | | |
| IE cak LS | | | | | | |
| 1-18 VH G1m17, 1 | G1m17, 1 | 1-18 | CH1_ED_G1m17 | Hinge | CH2 | CH3_G1m17, 1 |
| K147E + K213D | | | | | | |
| 1-18 VH G1m17, 1 | G1m17, 1 | 1-18 | CH1_ED_G1m17 | Hinge | CH2 | CH3_LS_G1m17, 1 |
| K147E + K213D LS | | | | | | |
| 1-18 VH G1m17, 1 | G1m17, 1 | 1-18 | CH1_ED_G1m17 | Hinge | CH2_GAALIE | CH3_LS_G1m17, 1 |
| K147E + K213D | | | | | | |
| GAALIE LS | | | | | | |
| 1-18 VH G1m17, 1 | G1m17, 1 | 1-18 | CH1_ED_G1m17 | Hinge | CH2_GAIE | CH3_LS_G1m17, 1 |
| K147E + K213D | | | | | | |
| GAIE LS | | | | | | |
| 1-18 VH G1m17, 1 | G1m17, 1 | 1-18 | CH1_ED_G1m17 | Hinge | CH2_GA | CH3_LS_G1m17, 1 |
| K147E + K213D | | | | | | |
| GA LS | | | | | | |
| 1-18 VH G1m17, 1 | G1m17, 1 | 1-18 | CH1_ED_G1m17 | Hinge | CH2_IE | CH3_LS_G1m17, 1 |
| K147E + K213D | | | | | | |
| IE LS | | | | | | |
| 1-18 VH G1m17, 1 | G1m17, 1 | 1-18 | CH1_ED_G1m17 | Hinge | CH2 | CH3_cah_LS_G1m17, 1 |
| K147E + K213D | | | | | | |
| cah LS | | | | | | |
| 1-18 VH G1m17, 1 | G1m17, 1 | 1-18 | CH1_ED_G1m17 | Hinge | CH2_GAALIE | CH3_cah_LS_G1m17, 1 |
| K147E + K213D | | | | | | |
| GAALIE cah LS | | | | | | |
| 1-18 VH G1m17, 1 | G1m17, 1 | 1-18 | CH1_ED_G1m17 | Hinge | CH2_GAIE | CH3_cah_LS_G1m17, 1 |
| K147E + K213D | | | | | | |
| GAIE cah LS | | | | | | |
| 1-18 VH G1m17, 1 | G1m17, 1 | 1-18 | CH1_ED_G1m17 | Hinge | CH2_GA | CH3_cah_LS_G1m17, 1 |
| K147E + K213D | | | | | | |
| GA cah LS | | | | | | |
| 1-18 VH G1m17, 1 | G1m17, 1 | 1-18 | CH1_ED_G1m17 | Hinge | CH2_IE | CH3_cah_LS_G1m17, 1 |
| K147E + K213D | | | | | | |
| IE cah LS | | | | | | |
| 1-18 VH G1m17, 1 | G1m17, 1 | 1-18 | CH1_ED_G1m17 | Hinge | CH2 | CH3_cak_LS_G1m17, 1 |
| K147E + K213D | | | | | | |
| cak LS | | | | | | |
| 1-18 VH G1m17, 1 | G1m17, 1 | 1-18 | CH1_ED_G1m17 | Hinge | CH2_GAALIE | CH3_cak_LS_G1m17, 1 |
| K147E + K213D | | | | | | |
| GAALIE cak LS | | | | | | |
| 1-18 VH G1m17, 1 | G1m17, 1 | 1-18 | CH1_ED_G1m17 | Hinge | CH2_GAIE | CH3_cak_LS_G1m17, 1 |
| K147E + K213D | | | | | | |
| GAIE cak LS | | | | | | |
| 1-18 VH G1m17, 1 | G1m17, 1 | 1-18 | CH1_ED_G1m17 | Hinge | CH2_GA | CH3_cak_LS_G1m17, 1 |
| K147E + K213D | | | | | | |
| GA cak LS | | | | | | |
| 1-18 VH G1m17, 1 | G1m17, 1 | 1-18 | CH1_ED_G1m17 | Hinge | CH2_IE | CH3_cak_LS_G1m17, 1 |
| K147E + K213D | | | | | | |
| IE cak LS | | | | | | |
| CrossMab^{CH1-cv} format | | | | | | |
| Light Chain | Allotype | VL | CL | — | — | — |
| 1-18 VL | — | 1-18 | E123K + Q124R | — | — | — |
| E123K + Q124R | | | | | | |
| 1-18 VL | — | 1-18 | E123K + Q124R | — | — | — |
| E123R + Q124K | | | | | | |

D. scFv-Fc

[0514] In some embodiments, an antibody agent described herein (e.g., an HIV antibody agent) is in a single-chain Fv (sFv or scFv) format. A scFv is an antibody fragment that comprises the V_{H} and V_{L} antibody domains connected into a single polypeptide chain. An scFv polypeptide can further comprise a polypeptide linker that connects the V_{H} and V_{L} domains that enable the scFv to form the desired structure for antigen binding (see, e.g., FIG. 4E, and Pluckthun, The Pharmacology of Monoclonal Antibodies, vol. 113; Rosenburg and Moore eds., Springer-Verlag, New York, pp. 269-315 (1994); each of which is herein incorporated by reference).

[0515] Antibody agents as described herein in scFv format can be part of a fusion that includes a scFv domain fused to an Fc domain of an antibody (see e.g., FIG. 4D, herein referred to as “scFv-Fc” or “scFv-Fc fusion”). Such a format presents certain advantages over other antibody formats in that mispairing of the heavy chain and light chain of the antibody is avoided.

[0516] An scFv-Fc fusion antibody agent may be encoded by a single polyribonucleotide comprising a first coding region that encodes a single-chain variable fragment (scFv) that preferentially binds to an epitope of HIV and a Fc domain (e.g., hIgG1). In some embodiments, a polyribonucleotide encodes a scFv in 5′ to 3′ order: heavy chain variable region (VH), linker (e.g., (G4S)₄ (“LL4”) or (G4S)₅ (“LL5”)) and a light chain variable region (VL) (see e.g., FIG. 8A). In some embodiments, a polyribonucleotide encodes a scFv in 5′ to 3′ order: VL, linker (e.g., (GGGGS)₄ (“LL4”) or (GGGGS)₅ (“LL5”)), VH (see e.g., FIG. 8B).

[0517] In some embodiments, a polyribonucleotide may encode a scFv-Fc antibody agent as described herein. In some embodiments, a polyribonucleotide encoding a scFv-Fc antibody heavy chain comprises a ribonucleic acid sequence encoding a VH domain, a hinge domain, a CH2 domain, and a CH3 domain.

[0518] Linkers included in scFv formats described herein may include a flexible linker. In some embodiments, a flexible linker contains at least 1 flexible amino acid (e.g., Gly). Exemplary flexible linkers include glycine polymers (G)ₙ, glycine-serine polymers (including, for example, (GS)ₙ, (GSGGS)ₙ and (GGGGS)ₙ, where n is an integer of at least one), glycine-alanine polymers, alanine-serine polymers, and other flexible linkers known in the art. Glycine and glycine-serine polymers are relatively unstructured, and therefore may be able to serve as a neutral tether between components. Glycine accesses significantly more phi-psi space than even alanine, and is much less restricted than residues with longer side chains (see Scheraga, Rev. Computational Chem. 11:173-142 (1992), which is herein incorporated by reference). Exemplary flexible linkers to be used in scFv formats described herein include, but are not limited to:

(SEQ ID NO: 32)
GGGGSGGGGSGGGGSGGGGS
(SEQ ID NO: 35)
GGGGSGGGGGGGGSGGGGSGGGGS

[0519] Linkers utilized in scFv formats as described herein can be readily selected and can be of various lengths, such as from 1 amino acid (e.g., Gly) to 20 amino acids, from 2 amino acids to 15 amino acids, from 3 amino acids to 12 amino acids, including 4 amino acids to 10 amino acids, 5 amino acids to 9 amino acids, 6 amino acids to 8 amino acids, or 7 amino acids to 8 amino acids (e.g., at least 1, 2, 3, 4, 5, 6, 7, 8, 9, 10, 11, 12, 13, 14, 15, 16, 17, 18, or 19 amino acids).

[0520] In some embodiments, an scFv-Fc encoded by one or more polyribonucleotides described herein includes all or part of a 1-18 antibody. In some embodiments, an scFv-Fc encoded by one or more polyribonucleotides provided herein includes all or part of a 1-18 antibody. In some embodiments, an scFv-Fc comprises a heavy chain variable domain comprising: (i) HCDR1 (DDPYTDDDTFTKYW; SEQ ID NO: 6); (ii) HCDR2 (ISPHFARP; SEQ ID NO: 9); (iii) HCDR3 (ARDPFGDRAPHYNYHMDV; SEQ ID NO: 12); or (iv) a combination thereof. In some embodiments, an scFv-Fc comprises a heavy chain variable domain comprising: (i) HCDR1 (DDPYTDDDTFTKYW; SEQ ID NO: 6); (ii) HCDR2 (ISPHFARP; SEQ ID NO: 9); and (iii) HCDR3 (ARDPFGDRAPHYNYHMDV; SEQ ID NO: 12). In some embodiments, an scFv-Fc comprises a light chain variable domain comprising: (i) LCDR1 (QGLDSSH; SEQ ID NO: 15); (ii) LCDR2 (GTS; SEQ ID NO: 18); (iii) LCDR3 (QRYGGTPIT; SEQ ID NO: 21); or (iv) a combination thereof. In some embodiments, an scFv-Fc comprises a light chain variable domain comprising: (i) LCDR1 (QGLDSSH; SEQ ID NO: 15); (ii) LCDR2 (GTS; SEQ ID NO: 18); and (iii) LCDR3 (QRYGGTPIT; SEQ ID NO: 21). In some embodiments, an scFv-Fc comprises (a) a heavy chain variable domain comprising: (i) HCDR1 (DDPYTDDDTFTKYW; SEQ ID NO: 6); (ii) HCDR2 (ISPHFARP; SEQ ID NO: 9); (iii) HCDR3 (ARDPFGDRAPHYNYHMDV; SEQ ID NO: 12); or (iv) a combination thereof; and (b) a light chain variable domain comprising: (i) LCDR1 (QGLDSSH; SEQ ID NO: 15); (ii) LCDR2 (GTS; SEQ ID NO: 18); (iii) LCDR3 (QRYGGTPIT; SEQ ID NO: 21); or (iv) a combination thereof. In some embodiments, an scFv-Fc comprises (a) a heavy chain variable domain comprising: (i) HCDR1 (DDPYTDDDTFTKYW; SEQ ID NO: 6); (ii) HCDR2 (ISPHFARP; SEQ ID NO: 9); and (iii) HCDR3 (ARDPFGDRAPHYNYHMDV; SEQ ID NO: 12); and (b) a light chain variable domain comprising: (i) LCDR1 (QGLDSSH; SEQ ID NO: 15); (ii) LCDR2 (GTS; SEQ ID NO: 18); and (iii) LCDR3 (QRYGGTPIT; SEQ ID NO: 21).

[0521] In some embodiments, a polyribonucleotide described herein encodes all or part of a 1-18 antibody. In some embodiments, a polyribonucleotide described herein encodes an immunoglobulin chain comprising a heavy chain variable domain, wherein the heavy chain variable domain comprises: (i) HCDR1 (DDPYTDDDTFTKYW; SEQ ID NO: 6); (ii) HCDR2 (ISPHFARP; SEQ ID NO: 9); (iii) HCDR3 (ARDPFGDRAPHYNYHMDV; SEQ ID NO: 12); or (iv) a combination thereof. In some embodiments, a polyribonucleotide described herein encodes an immunoglobulin chain comprising a heavy chain variable domain, wherein the heavy chain variable domain comprises: (i) HCDR1 (DDPYTDDDTFTKYW; SEQ ID NO: 6); (ii) HCDR2 (ISPHFARP; SEQ ID NO: 9); and (iii) HCDR3 (ARDPFGDRAPHYNYHMDV; SEQ ID NO: 12). In some embodiments, a polyribonucleotide described herein encodes an immunoglobulin chain comprising a light chain variable domain, wherein the light chain variable domain comprises: (i) LCDR1 (QGLDSSH; SEQ ID NO: 15); (ii) LCDR2 (GTS; SEQ ID NO: 18); (iii) LCDR3 (QRYGGTPIT; SEQ ID NO: 21); or (iv) a combination thereof. In some embodiments, a polyribonucleotide described herein encodes an immunoglobulin chain comprising a light chain variable domain, wherein the light chain variable domain comprises: (i) LCDR1 (QGLDSSH; SEQ ID NO: 15); (ii) LCDR2 (GTS; SEQ ID NO: 18); and (iii) LCDR3 (QRYGGTPIT; SEQ ID NO: 21). In some embodiments, a polyribonucleotide described herein encodes an immunoglobulin chain comprising a heavy chain variable domain and a light chain variable domain, wherein the heavy chain variable domain comprises: (i) HCDR1 (DDPYTDDDTFTKYW; SEQ ID NO: 6); (ii) HCDR2 (ISPHFARP; SEQ ID NO: 9); (iii) HCDR3 (ARDPFGDRAPHYNYHMDV; SEQ ID NO: 12); or (iv) a combination thereof; and the light chain variable domain comprises: (i) LCDR1 (QGLDSSH; SEQ ID NO: 15); (ii) LCDR2 (GTS; SEQ ID NO: 18); (iii) LCDR3 (QRYGGTPIT; SEQ ID NO: 21); or (iv) a combination thereof. In some embodiments, a polyribonucleotide described herein encodes an immunoglobulin chain comprising a heavy chain variable domain and a light chain variable domain, wherein the heavy chain variable domain comprises: (i) HCDR1 (DDPYTDDDTFTKYW; SEQ ID NO: 6); (ii) HCDR2 (ISPHFARP; SEQ ID NO: 9); and (iii) HCDR3 (ARDPFGDRAPHYNYHMDV; SEQ ID NO: 12); and the light chain variable domain comprises: (i) LCDR1 (QGLDSSH; SEQ ID NO: 15); (ii) LCDR2 (GTS; SEQ ID NO: 18); and (iii) LCDR3 (QRYGGTPIT; SEQ ID NO: 21).

[0522] In some embodiments, a scFv-Fc comprises a heavy chain variable domain having at least 80%, 85%, 90%, 91%, 92%, 93%, 94%, 95%, 96%, 97%, 98%, or 99% sequence identity to an amino acid sequence represented by SEQ ID NO: 24. In some embodiments, a scFv-Fc comprises a light chain variable domain having at least 80%, 85%, 90%, 91%, 92%, 93%, 94%, 95%, 96%, 97%, 98%, or 99% identity to an amino acid sequence represented by SEQ ID NO: 29. In some embodiments, a scFv-Fc comprises a heavy chain variable domain represented by SEQ ID NO: 24. In some embodiments, scFv-Fc comprises a light chain variable domain represented by SEQ ID NO: 29.

[0523] In some embodiments, a polyribonucleotide described herein encodes an immunoglobulin chain comprising a heavy chain variable domain having at least 80%, 85%, 90%, 91%, 92%, 93%, 94%, 95%, 96%, 97%, 98%, or 99% sequence identity to an amino acid sequence represented by SEQ ID NO: 24. In some embodiments, a polyribonucleotide described herein encodes an immunoglobulin chain comprising a light chain variable domain having at least 80%, 85%, 90%, 91%, 92%, 93%, 94%, 95%, 96%, 97%, 98%, or 99% sequence identity to an amino acid sequence represented by SEQ ID NO: 29. In some embodiments, a polyribonucleotide described herein encodes an immunoglobulin chain comprising a heavy chain variable domain and a light chain variable domain, wherein the heavy chain variable domain has at least 80%, 85%, 90%, 91%, 92%, 93%, 94%, 95%, 96%, 97%, 98%, or 99% sequence identity to an amino acid sequence represented by SEQ ID NO: 24, and wherein the light chain variable domain has at least 80%, 85%, 90%, 91%, 92%, 93%, 94%, 95%, 96%, 97%, 98%, or 99% sequence identity to an amino acid sequence represented by SEQ ID NO: 29.

[0524] An Fc region of scFv-Fc described herein may include an Fc region comprising any particular heavy chain constant domain that correspond to the different classes of immunoglobulins which include α, δ, ε, γ, and, respectively. An Fc region of the scFv-Fc described herein may comprise a human Fc region sequence (e.g., a human IgG1, IgG2, IgG3 or IgG4 Fc region) comprising an amino acid modification (e.g., a substitution) at one or more amino acid positions. In some embodiments, a conventional antibody encoded by one or more polyribonucleotides as described herein comprises a Fc region that comprises a G1m3, G1m17, or a Glm17,1 allotype.

[0525] In some embodiments, a scFv-Fc encoded by one or more polyribonucleotides as described herein may comprise one or more heavy chain constant domains. In some embodiments, one or more heavy chain constant domains comprise a CH3 domain. In some embodiments, a scFv-Fc as described herein may include the L/S mutation within the CH3 region (for enhanced FcRn binding) (Zalevsky J et al. Nat Biotechnol. 2010, which is herein incorporated by reference). Such mutations are noted as M428L and N434S according to EU numbering, and referred to herein as “LS” or “L/S” (see e.g., FIG. 5C). In some embodiments, a scFv-Fc comprises an E294 deletion (for Fc hypersialylation) (Bas M et al. J Immunol 2019, which is herein incorporated by reference).

[0526] In some embodiments, a scFv-Fc comprises a CH3 domain comprising one or more of the following mutations: Y349C, T366S, L368A, and Y407V (according to EU numbering). Such a combination of mutations is referred to herein as “cah”. In some embodiments, a scFv-Fc comprises a CH3 domain comprising one or more mutations selected from: S354C and T366W (according to EU numbering). Such a combination of CH3 mutations is referred to herein as “cak”. In some embodiments, a scFv-Fc comprises a CH3 domain that comprises a G1m3, G1m17, or a Glm17,1 allotype. In some embodiments, a scFv-Fc comprises a CH3 domain that comprises an amino acid sequence at least 90%, 91%, 92%, 93%, 94%, 95%, 96%, 97%, 98%, or 99% identical to a sequence represented by represented in any one of SEQ ID NOs: 68, 71, 74, 77, 80, 83, 86, or 89. In some embodiments, a scFv-Fc comprises a CH3 domain that comprises an amino acid sequence represented in any one of SEQ ID NOs: 68, 71, 74, 77, 80, 83, 86, or 89.

[0527] As described herein, a scFv-Fc comprises a scFv fused to an Fc domain of an antibody. Accordingly, such formats do not comprise a CH1 domain.

[0528] An scFv of scFv-Fc may be encoded by a sequence that includes in 5′ to 3′ direction, the following domains: a heavy chain variable domain (VH)-linker-a light chain variable domain (VL)-Fc domain. In some embodiments, scFv-Fc fusion may be encoded by a sequence that includes, in 5′ to 3′ direction, the following domains: a VL-linker-VH-Fc domain.

[0529] In some embodiments, a scFv-Fc comprises a hinge domain that comprises an amino acid modification that comprises a C220S mutation (according to EU numbering). Such a mutated hinge domain is referred to herein as “Hinge_S” or “C/S”. In some embodiments, a scFv-Fc comprises a hinge domain that comprises an amino acid sequence that is at least 90%, 91%, 92%, 93%, 94%, 95%, 96%, 97%, 98%, or 99% identical to a sequence represented in SEQ ID NO: 107. In some embodiments, a scFv-Fc comprises a hinge domain that comprises an amino acid sequence represented in SEQ ID NO: 107.

[0530] In some embodiments, a scFv-Fc comprises a CH2 domain that comprises an amino acid sequence at least 90%, 91%, 92%, 93%, 94%, 95%, 96%, 97%, 98%, or 99% identical to represented in SEQ ID NO: 53. In some embodiments, a scFv-Fc comprises a CH2 domain that comprises an amino acid sequence represented in SEQ ID NO: 53. In some embodiments, a scFv-Fc comprises a CH2 domain that comprises one or more mutations (e.g., with respect to SEQ ID NO: 53). For example, in some embodiments, a scFv-Fc comprises one or more of the following mutations: G236A, A330L, and I332E (according to EU numbering). Such a combination of mutations is referred to herein as “GAALIE”. Such mutations in the CH2 domain have been associated with increased affinity to Fc receptors FcgRIIA and FcgRIII for enhanced antibody effector function. In some embodiments, a scFv-Fc comprises a CH2 domain that comprises an amino acid sequence that is at least 90%, 91%, 92%, 93%, 94%, 95%, 96%, 97%, 98%, or 99% identical to SEQ ID NO: 56. In some embodiments, a scFv-Fc comprises a CH2 domain that comprises an amino acid sequence represented in SEQ ID NO: 56. In some embodiments, a scFv-Fc comprises one or more mutations selected from: G236A and I332E (according to EU numbering). Such a combination of CH2 mutations is referred to herein as “GAIE”. In some embodiments, a scFv-Fc comprises a CH2 domain that comprises an amino acid sequence at least 90%, 91%, 92%, 93%, 94%, 95%, 96%, 97%, 98%, or 99% identical to SEQ ID NO: 59. In some embodiments, a scFv-Fc comprises a CH2 domain that comprises an amino acid sequence represented in SEQ ID NO: 59. In some embodiments, a scFv-Fc comprises a mutation: G236A (according to EU numbering), referred to herein as “GA”. In some embodiments, a scFv-Fc comprises a CH2 domain that comprises an amino acid sequence at least 90%, 91%, 92%, 93%, 94%, 95%, 96%, 97%, 98%, or 99% identical to SEQ ID NO: 62. In some embodiments, a scFv-Fc comprises a CH2 domain that comprises an amino acid sequence represented in SEQ ID NO: 62. In some embodiments, a scFv-Fc comprises a mutation: I332E (according to EU numbering), referred to herein as “IE”. In some embodiments, a scFv-Fc comprises a CH2 domain that comprises an amino acid sequence at least 90%, 91%, 92%, 93%, 94%, 95%, 96%, 97%, 98%, or 99% identical to SEQ ID NO: 65. In some embodiments, a scFv-Fc comprises a CH2 domain that comprises an amino acid sequence represented in SEQ ID NO: 65.

[0531] In some embodiments, a scFv-Fc encoded by one or more polyribonucleotides as described herein comprises a signal peptide comprising a husec2 signal peptide. In some embodiments, a scFv-Fc comprises a signal peptide comprising SEQ ID NO: 1.

[0532] In some embodiments, a scFv-Fc encoded by one or more polyribonucleotides as described herein comprises an immunoglobulin chain encoded by a nucleic acid sequence that has at least 80%, 85%, 90%, 91%, 92%, 93%, 94%, 95%, 96%, 97%, 98%, or 99% sequence identity to a sequence represented by SEQ ID NO: 257-448, 655, 658, 661, and 664. In some embodiments, a scFv-Fc comprises an immunoglobulin chain represented by any one of SEQ ID NOs: 257-448, 655, 658, 661, and 664.

[0533] In some embodiments, a scFv-Fc encoded by one or more polyribonucleotides as described herein comprises an immunoglobulin chain comprising an amino acid sequence that has at least 80%, 85%, 90%, 91%, 92%, 93%, 94%, 95%, 96%, 97%, 98%, or 99% sequence identity to a sequence represented by any one of SEQ ID NOs: 656, 659, 662, and 665. In some embodiments, a scFv-Fc encoded by one or more polyribonucleotides as described herein comprises an immunoglobulin chain comprising an amino acid sequence represented by any one of SEQ ID NOs: 656, 659, 662, and 665.

[0534] Exemplary configurations of scFv-Fc, as described herein, is shown in Table 5 below.

TABLE 5
Exemplary scFv-Fc Configurations

| scFv-Fc formats | Allotype | VH | VL | Hinge | CH2 | CH3 |
|---|---|---|---|---|---|---|
| 1-18 VH-(G4S)4-VL G1m3 | G1m3 | 1-18 | 1-18 | Hinge_S | CH2 | CH3_G1m3/17 |
| CH1del C220S | | | | | | |
| 1-18 VH-(G4S)4-VL G1m3 | G1m3 | 1-18 | 1-18 | Hinge_S | CH2 | CH3_LS_G1m3/17 |
| CH1del C220S LS | | | | | | |
| 1-18 VH-(G4S)4-VL G1m3 | G1m3 | 1-18 | 1-18 | Hinge_S | CH2_GAALIE | CH3_LS_G1m3/17 |
| CH1del C220S GAALIE LS | | | | | | |
| 1-18 VH-(G4S)4-VL G1m3 | G1m3 | 1-18 | 1-18 | Hinge_S | CH2_GAIE | CH3_LS_G1m3/17 |
| CH1del C220S GAIE LS | | | | | | |
| 1-18 VH-(G4S)4-VL G1m3 | G1m3 | 1-18 | 1-18 | Hinge_S | CH2_GA | CH3_LS_G1m3/17 |
| CH1del C220S GA LS | | | | | | |
| 1-18 VH-(G4S)4-VL G1m3 | G1m3 | 1-18 | 1-18 | Hinge_S | CH2_IE | CH3_LS_G1m3/17 |
| CH1del C220S IE LS | | | | | | |
| 1-18 VH-(G4S)4-VL G1m3 | G1m3 | 1-18 | 1-18 | Hinge_S | CH2 | CH3_cah_LS_G1m3/17 |
| CH1del C220S cah LS | | | | | | |
| 1-18 VH-(G4S)4-VL G1m3 | G1m3 | 1-18 | 1-18 | Hinge_S | CH2_GAALIE | CH3_cah_LS_G1m3/17 |
| CH1del C220S GAALIE cah LS | | | | | | |
| 1-18 VH-(G4S)4-VL G1m3 | G1m3 | 1-18 | 1-18 | Hinge_S | CH2_GAIE | CH3_cah_LS_G1m3/17 |
| CH1del C220S GAIE cah LS | | | | | | |
| 1-18 VH-(G4S)4-VL G1m3 | G1m3 | 1-18 | 1-18 | Hinge_S | CH2_GA | CH3_cah_LS_G1m3/17 |
| CH1del C220S GA cah LS | | | | | | |
| 1-18 VH-(G4S)4-VL G1m3 | G1m3 | 1-18 | 1-18 | Hinge_S | CH2_IE | CH3_cah_LS_G1m3/17 |
| CH1del C220S IE cah LS | | | | | | |
| 1-18 VH-(G4S)4-VL G1m3 | G1m3 | 1-18 | 1-18 | Hinge_S | CH2 | CH3_cak_LS_G1m3/17 |
| CH1del C220S cak LS | | | | | | |
| 1-18 VH-(G4S)4-VL G1m3 | G1m3 | 1-18 | 1-18 | Hinge_S | CH2_GAALIE | CH3_cak_LS_G1m3/17 |
| CH1del C220S GAALIE cak LS | | | | | | |
| 1-18 VH-(G4S)4-VL G1m3 | G1m3 | 1-18 | 1-18 | Hinge_S | CH2_GAIE | CH3_cak_LS_G1m3/17 |
| CH1del C220S GAIE cak LS | | | | | | |
| 1-18 VH-(G4S)4-VL G1m3 | G1m3 | 1-18 | 1-18 | Hinge_S | CH2_GA | CH3_cak_LS_G1m3/17 |
| CH1del C220S GA cak LS | | | | | | |
| 1-18 VH-(G4S)4-VL G1m3 | G1m3 | 1-18 | 1-18 | Hinge_S | CH2_IE | CH3_cak_LS_G1m3/17 |
| CH1del C220S IE cak LS | | | | | | |
| 1-18 VH-(G4S)4-VL G1m17 | G1m17 | 1-18 | 1-18 | Hinge_S | CH2 | CH3_G1m3/17 |
| CH1del C220S | | | | | | |
| 1-18 VH-(G4S)4-VL G1m17 | G1m17 | 1-18 | 1-18 | Hinge_S | CH2 | CH3_LS_G1m3/17 |
| CH1del C220S LS | | | | | | |
| 1-18 VH-(G4S)4-VL G1m17 | G1m17 | 1-18 | 1-18 | Hinge_S | CH2_GAALIE | CH3_LS_G1m3/17 |
| CH1del C220S GAALIE LS | | | | | | |
| 1-18 VH-(G4S)4-VL G1m17 | G1m17 | 1-18 | 1-18 | Hinge_S | CH2_GAIE | CH3_LS_G1m3/17 |
| CH1del C220S GAIE LS | | | | | | |
| 1-18 VH-(G4S)4-VL G1m17 | G1m17 | 1-18 | 1-18 | Hinge_S | CH2_GA | CH3_LS_G1m3/17 |
| CH1del C220S GA LS | | | | | | |
| 1-18 VH-(G4S)4-VL G1m17 | G1m17 | 1-18 | 1-18 | Hinge_S | CH2_IE | CH3_LS_G1m3/17 |
| CH1del C220S IE LS | | | | | | |
| 1-18 VH-(G4S)4-VL G1m17 | G1m17 | 1-18 | 1-18 | Hinge_S | CH2 | CH3_cah_LS_G1m3/17 |
| CH1del C220S cah LS | | | | | | |
| 1-18 VH-(G4S)4-VL G1m17 | G1m17 | 1-18 | 1-18 | Hinge_S | CH2_GAALIE | CH3_cah_LS_G1m3/17 |
| CH1del C220S GAALIE cah LS | | | | | | |
| 1-18 VH-(G4S)4-VL G1m17 | G1m17 | 1-18 | 1-18 | Hinge_S | CH2_GAIE | CH3_cah_LS_G1m3/17 |
| CH1del C220S GAIE cah LS | | | | | | |
| 1-18 VH-(G4S)4-VL G1m17 | G1m17 | 1-18 | 1-18 | Hinge_S | CH2_GA | CH3_cah_LS_G1m3/17 |
| CH1del C220S GA cah LS | | | | | | |
| 1-18 VH-(G4S)4-VL G1m17 | G1m17 | 1-18 | 1-18 | Hinge_S | CH2_IE | CH3_cah_LS_G1m3/17 |
| CH1del C220S IE cah LS | | | | | | |
| 1-18 VH-(G4S)4-VL G1m17 | G1m17 | 1-18 | 1-18 | Hinge_S | CH2 | CH3_cak_LS_G1m3/17 |
| CH1del C220S cak LS | | | | | | |
| 1-18 VH-(G4S)4-VL G1m17 | G1m17 | 1-18 | 1-18 | Hinge_S | CH2_GAALIE | CH3_cak_LS_G1m3/17 |
| CH1del C220S GAALIE cak LS | | | | | | |
| 1-18 VH-(G4S)4-VL G1m17 | G1m17 | 1-18 | 1-18 | Hinge_S | CH2_GAIE | CH3_cak_LS_G1m3/17 |
| CH1del C220S GAIE cak LS | | | | | | |
| 1-18 VH-(G4S)4-VL G1m17 | G1m17 | 1-18 | 1-18 | Hinge_S | CH2_GA | CH3_cak_LS_G1m3/17 |
| CH1del C220S GA cak LS | | | | | | |
| 1-18 VH-(G4S)4-VL G1m17 | G1m17 | 1-18 | 1-18 | Hinge_S | CH2_IE | CH3_cak_LS_G1m3/17 |
| CH1del C220S IE cak LS | | | | | | |
| 1-18 VH-(G4S)4-VL | G1m17, 1 | 1-18 | 1-18 | Hinge_S | CH2 | CH3_G1m17, 1 |
| G1m17, 1 CH1del C220S | | | | | | |
| 1-18 VH-(G4S)4-VL | G1m17, 1 | 1-18 | 1-18 | Hinge_S | CH2 | CH3_LS_G1m17, 1 |
| G1m17, 1 CH1del C220S LS | | | | | | |
| 1-18 VH-(G4S)4-VL | G1m17, 1 | 1-18 | 1-18 | Hinge_S | CH2_GAALIE | CH3_LS_G1m17, 1 |
| G1m17, 1 CH1del C220S | | | | | | |
| GAALIE LS | | | | | | |
| 1-18 VH-(G4S)4-VL | G1m17, 1 | 1-18 | 1-18 | Hinge_S | CH2_GAIE | CH3_LS_G1m17, 1 |
| G1m17, 1 CH1del C220S | | | | | | |
| GAIE LS | | | | | | |
| 1-18 VH-(G4S)4-VL | G1m17, 1 | 1-18 | 1-18 | Hinge_S | CH2_GA | CH3_LS_G1m17, 1 |
| G1m17, 1 CH1del C220S | | | | | | |
| GA LS | | | | | | |
| 1-18 VH-(G4S)4-VL | G1m17, 1 | 1-18 | 1-18 | Hinge_S | CH2_IE | CH3_LS_G1m17, 1 |
| G1m17, 1 CH1del C220S | | | | | | |
| IE LS | | | | | | |
| 1-18 VH-(G4S)4-VL | G1m17, 1 | 1-18 | 1-18 | Hinge_S | CH2 | CH3_cah_LS_G1m17, 1 |
| G1m17, 1 CH1del C220S | | | | | | |
| cah LS | | | | | | |
| 1-18 VH-(G4S)4-VL | G1m17, 1 | 1-18 | 1-18 | Hinge_S | CH2_GAALIE | CH3_cah_LS_G1m17, 1 |
| G1m17, 1 CH1del C220S | | | | | | |
| GAALIE cah LS | | | | | | |
| 1-18 VH-(G4S)4-VL | G1m17, 1 | 1-18 | 1-18 | Hinge_S | CH2_GAIE | CH3_cah_LS_G1m17, 1 |
| G1m17, 1 CH1del C220S | | | | | | |
| GAIE cah LS | | | | | | |
| 1-18 VH-(G4S)4-VL | G1m17, 1 | 1-18 | 1-18 | Hinge_S | CH2_GA | CH3_cah_LS_G1m17, 1 |
| G1m17, 1 CH1del C220S | | | | | | |
| GA cah LS | | | | | | |
| 1-18 VH-(G4S)4-VL | G1m17, 1 | 1-18 | 1-18 | Hinge_S | CH2_IE | CH3_cah_LS_G1m17, 1 |
| G1m17, 1 CH1del C220S | | | | | | |
| IE cah LS | | | | | | |
| 1-18 VH-(G4S)4-VL | G1m17, 1 | 1-18 | 1-18 | Hinge_S | CH2 | CH3_cak_LS_G1m17, 1 |
| G1m17, 1 CH1del C220S | | | | | | |
| cak LS | | | | | | |
| 1-18 VH-(G4S)4-VL | G1m17, 1 | 1-18 | 1-18 | Hinge_S | CH2_GAALIE | CH3_cak_LS_G1m17, 1 |
| G1m17, 1 CH1del C220S | | | | | | |
| GAALIE cak LS | | | | | | |
| 1-18 VH-(G4S)4-VL | G1m17, 1 | 1-18 | 1-18 | Hinge_S | CH2_GAIE | CH3_cak_LS_G1m17, 1 |
| G1m17, 1 CH1del C220S | | | | | | |
| GAIE cak LS | | | | | | |
| 1-18 VH-(G4S)4-VL | G1m17, 1 | 1-18 | 1-18 | Hinge_S | CH2_GA | CH3_cak_LS_G1m17, 1 |
| G1m17, 1 CH1del C220S | | | | | | |
| GA cak LS | | | | | | |
| 1-18 VH-(G4S)4-VL | G1m17, 1 | 1-18 | 1-18 | Hinge_S | CH2_IE | CH3_cak_LS_G1m17, 1 |
| G1m17, 1 CH1del C220S | | | | | | |
| IE cak LS | | | | | | |
| 1-18 VL-(G4S)4-VH G1m3 | G1m3 | 1-18 | 1-18 | Hinge_S | CH2 | CH3_G1m3/17 |
| CH1del C220S | | | | | | |
| 1-18 VL-(G4S)4-VH G1m3 | G1m3 | 1-18 | 1-18 | Hinge_S | CH2 | CH3_LS_G1m3/17 |
| CH1del C220S LS | | | | | | |
| 1-18 VL-(G4S)4-VH G1m3 | G1m3 | 1-18 | 1-18 | Hinge_S | CH2_GAALIE | CH3_LS_G1m3/17 |
| CH1del C220S GAALIE LS | | | | | | |
| 1-18 VL-(G4S)4-VH G1m3 | G1m3 | 1-18 | 1-18 | Hinge_S | CH2_GAIE | CH3_LS_G1m3/17 |
| CH1del C220S GAIE LS | | | | | | |
| 1-18 VL-(G4S)4-VH G1m3 | G1m3 | 1-18 | 1-18 | Hinge_S | CH2_GA | CH3_LS_G1m3/17 |
| CH1del C220S GA LS | | | | | | |
| 1-18 VL-(G4S)4-VH G1m3 | G1m3 | 1-18 | 1-18 | Hinge_S | CH2_IE | CH3_LS_G1m3/17 |
| CH1del C220S IE LS | | | | | | |
| 1-18 VL-(G4S)4-VH G1m3 | G1m3 | 1-18 | 1-18 | Hinge_S | CH2 | CH3_cah_LS_G1m3/17 |
| CH1del C220S cah LS | | | | | | |
| 1-18 VL-(G4S)4-VH G1m3 | G1m3 | 1-18 | 1-18 | Hinge_S | CH2_GAALIE | CH3_cah_LS_G1m3/17 |
| CH1del C220S GAALIE cah LS | | | | | | |
| 1-18 VL-(G4S)4-VH G1m3 | G1m3 | 1-18 | 1-18 | Hinge_S | CH2_GAIE | CH3_cah_LS_G1m3/17 |
| CH1del C220S GAIE cah LS | | | | | | |
| 1-18 VL-(G4S)4-VH G1m3 | G1m3 | 1-18 | 1-18 | Hinge_S | CH2_GA | CH3_cah_LS_G1m3/17 |
| CH1del C220S GA cah LS | | | | | | |
| 1-18 VL-(G4S)4-VH G1m3 | G1m3 | 1-18 | 1-18 | Hinge_S | CH2_IE | CH3_cah_LS_G1m3/17 |
| CH1del C220S IE cah LS | | | | | | |
| 1-18 VL-(G4S)4-VH G1m3 | G1m3 | 1-18 | 1-18 | Hinge_S | CH2 | CH3_cak_LS_G1m3/17 |
| CH1del C220S cak LS | | | | | | |
| 1-18 VL-(G4S)4-VH G1m3 | G1m3 | 1-18 | 1-18 | Hinge_S | CH2_GAALIE | CH3_cak_LS_G1m3/17 |
| CH1del C220S GAALIE cak LS | | | | | | |
| 1-18 VL-(G4S)4-VH G1m3 | G1m3 | 1-18 | 1-18 | Hinge_S | CH2_GAIE | CH3_cak_LS_G1m3/17 |
| CH1del C220S GAIE cak LS | | | | | | |
| 1-18 VL-(G4S)4-VH G1m3 | G1m3 | 1-18 | 1-18 | Hinge_S | CH2_GA | CH3_cak_LS_G1m3/17 |
| CH1del C220S GA cak LS | | | | | | |
| 1-18 VL-(G4S)4-VH G1m3 | G1m3 | 1-18 | 1-18 | Hinge_S | CH2_IE | CH3_cak_LS_G1m3/17 |
| CH1del C220S IE cak LS | | | | | | |
| 1-18 VL-(G4S)4-VH G1m17 | G1m17 | 1-18 | 1-18 | Hinge_S | CH2 | CH3_G1m3/17 |
| CH1del C220S | | | | | | |
| 1-18 VL-(G4S)4-VH G1m17 | G1m17 | 1-18 | 1-18 | Hinge_S | CH2 | CH3_LS_G1m3/17 |
| CH1del C220S LS | | | | | | |
| 1-18 VL-(G4S)4-VH G1m17 | G1m17 | 1-18 | 1-18 | Hinge_S | CH2_GAALIE | CH3_LS_G1m3/17 |
| CH1del C220S GAALIE LS | | | | | | |
| 1-18 VL-(G4S)4-VH G1m17 | G1m17 | 1-18 | 1-18 | Hinge_S | CH2_GAIE | CH3_LS_G1m3/17 |
| CH1del C220S GAIE LS | | | | | | |
| 1-18 VL-(G4S)4-VH G1m17 | G1m17 | 1-18 | 1-18 | Hinge_S | CH2_GA | CH3_LS_G1m3/17 |
| CH1del C220S GA LS | | | | | | |
| 1-18 VL-(G4S)4-VH G1m17 | G1m17 | 1-18 | 1-18 | Hinge_S | CH2_IE | CH3_LS_G1m3/17 |
| CH1del C220S IE LS | | | | | | |
| 1-18 VL-(G4S)4-VH G1m17 | G1m17 | 1-18 | 1-18 | Hinge_S | CH2 | CH3_cah_LS_G1m3/17 |
| CH1del C220S cah LS | | | | | | |
| 1-18 VL-(G4S)4-VH G1m17 | G1m17 | 1-18 | 1-18 | Hinge_S | CH2_GAALIE | CH3_cah_LS_G1m3/17 |
| CH1del C220S GAALIE cah LS | | | | | | |
| 1-18 VL-(G4S)4-VH G1m17 | G1m17 | 1-18 | 1-18 | Hinge_S | CH2_GAIE | CH3_cah_LS_G1m3/17 |
| CH1del C220S GAIE cah LS | | | | | | |
| 1-18 VL-(G4S)4-VH G1m17 | G1m17 | 1-18 | 1-18 | Hinge_S | CH2_GA | CH3_cah_LS_G1m3/17 |
| CH1del C220S GA cah LS | | | | | | |
| 1-18 VL-(G4S)4-VH G1m17 | G1m17 | 1-18 | 1-18 | Hinge_S | CH2_IE | CH3_cah_LS_G1m3/17 |
| CH1del C220S IE cah LS | | | | | | |
| 1-18 VL-(G4S)4-VH G1m17 | G1m17 | 1-18 | 1-18 | Hinge_S | CH2 | CH3_cak_LS_G1m3/17 |
| CH1del C220S cak LS | | | | | | |
| 1-18 VL-(G4S)4-VH G1m17 | G1m17 | 1-18 | 1-18 | Hinge_S | CH2_GAALIE | CH3_cak_LS_G1m3/17 |
| CH1del C220S GAALIE cak LS | | | | | | |
| 1-18 VL-(G4S)4-VH G1m17 | G1m17 | 1-18 | 1-18 | Hinge_S | CH2_GAIE | CH3_cak_LS_G1m3/17 |
| CH1del C220S GAIE cak LS | | | | | | |
| 1-18 VL-(G4S)4-VH G1m17 | G1m17 | 1-18 | 1-18 | Hinge_S | CH2_GA | CH3_cak_LS_G1m3/17 |
| CH1del C220S GA cak LS | | | | | | |
| 1-18 VL-(G4S)4-VH G1m17 | G1m17 | 1-18 | 1-18 | Hinge_S | CH2_IE | CH3_cak_LS_G1m3/17 |
| CH1del C220S IE cak LS | | | | | | |
| 1-18 VL-(G4S)4-VH | G1m17, 1 | 1-18 | 1-18 | Hinge_S | CH2 | CH3_G1m17, 1 |
| G1m17, 1 CH1del C220S | | | | | | |
| 1-18 VL-(G4S)4-VH | G1m17, 1 | 1-18 | 1-18 | Hinge_S | CH2 | CH3_LS_G1m17, 1 |
| G1m17, 1 CH1del C220S LS | | | | | | |
| 1-18 VL-(G4S)4-VH | G1m17, 1 | 1-18 | 1-18 | Hinge_S | CH2_GAALIE | CH3_LS_G1m17, 1 |
| G1m17, 1 CH1del C220S | | | | | | |
| GAALIE LS | | | | | | |
| 1-18 VL-(G4S)4-VH | G1m17, 1 | 1-18 | 1-18 | Hinge_S | CH2_GAIE | CH3_LS_G1m17, 1 |
| G1m17, 1 CH1del C220S | | | | | | |
| GAIE LS | | | | | | |
| 1-18 VL-(G4S)4-VH | G1m17, 1 | 1-18 | 1-18 | Hinge_S | CH2_GA | CH3_LS_G1m17, 1 |
| G1m17, 1 CH1del C220S | | | | | | |
| GA LS | | | | | | |
| 1-18 VL-(G4S)4-VH | G1m17, 1 | 1-18 | 1-18 | Hinge_S | CH2_IE | CH3_LS_G1m17, 1 |
| G1m17, 1 CH1del C220S | | | | | | |
| IE LS | | | | | | |
| 1-18 VL-(G4S)4-VH | G1m17, 1 | 1-18 | 1-18 | Hinge_S | CH2 | CH3_cah_LS_G1m17, 1 |
| G1m17, 1 CH1del C220S | | | | | | |
| cah LS | | | | | | |
| 1-18 VL-(G4S)4-VH | G1m17, 1 | 1-18 | 1-18 | Hinge_S | CH2_GAALIE | CH3_cah_LS_G1m17, 1 |
| G1m17, 1 CH1del C220S | | | | | | |
| GAALIE cah LS | | | | | | |
| 1-18 VL-(G4S)4-VH | G1m17, 1 | 1-18 | 1-18 | Hinge_S | CH2_GAIE | CH3_cah_LS_G1m17, 1 |
| G1m17, 1 CH1del C220S | | | | | | |
| GAIE cah LS | | | | | | |
| 1-18 VL-(G4S)4-VH | G1m17, 1 | 1-18 | 1-18 | Hinge_S | CH2_GA | CH3_cah_LS_G1m17, 1 |
| G1m17, 1 CH1del C220S | | | | | | |
| GA cah LS | | | | | | |
| 1-18 VL-(G4S)4-VH | G1m17, 1 | 1-18 | 1-18 | Hinge_S | CH2_IE | CH3_cah_LS_G1m17, 1 |
| G1m17, 1 CH1del C220S | | | | | | |
| IE cah LS | | | | | | |
| 1-18 VL-(G4S)4-VH | G1m17, 1 | 1-18 | 1-18 | Hinge_S | CH2 | CH3_cak_LS_G1m17, 1 |
| G1m17, 1 CH1del C220S | | | | | | |
| cak LS | | | | | | |
| 1-18 VL-(G4S)4-VH | G1m17, 1 | 1-18 | 1-18 | Hinge_S | CH2_GAALIE | CH3_cak_LS_G1m17, 1 |
| G1m17, 1 CH1del C220S | | | | | | |
| GAALIE cak LS | | | | | | |
| 1-18 VL-(G4S)4-VH | G1m17, 1 | 1-18 | 1-18 | Hinge_S | CH2_GAIE | CH3_cak_LS_G1m17, 1 |
| G1m17, 1 CH1del C220S | | | | | | |
| GAIE cak LS | | | | | | |
| 1-18 VL-(G4S)4-VH | G1m17, 1 | 1-18 | 1-18 | Hinge_S | CH2_GA | CH3_cak_LS_G1m17, 1 |
| G1m17, 1 CH1del C220S | | | | | | |
| GA cak LS | | | | | | |
| 1-18 VL-(G4S)4-VH | G1m17, 1 | 1-18 | 1-18 | Hinge_S | CH2_IE | CH3_cak_LS_G1m17, 1 |
| G1m17, 1 CH1del C220S | | | | | | |
| IE cak LS | | | | | | |
| 1-18 VH-(G4S)5-VL G1m3 | G1m3 | 1-18 | 1-18 | Hinge_S | CH2 | CH3_G1m3/17 |
| CH1del C220S | | | | | | |
| 1-18 VH-(G4S)5-VL G1m3 | G1m3 | 1-18 | 1-18 | Hinge_S | CH2 | CH3_LS_G1m3/17 |
| CH1del C220S LS | | | | | | |
| 1-18 VH-(G4S)5-VL G1m3 | G1m3 | 1-18 | 1-18 | Hinge_S | CH2_GAALIE | CH3_LS_G1m3/17 |
| CH1del C220S GAALIE LS | | | | | | |
| 1-18 VH-(G4S)5-VL G1m3 | G1m3 | 1-18 | 1-18 | Hinge_S | CH2_GAIE | CH3_LS_G1m3/17 |
| CH1del C220S GAIE LS | | | | | | |
| 1-18 VH-(G4S)5-VL G1m3 | G1m3 | 1-18 | 1-18 | Hinge_S | CH2_GA | CH3_LS_G1m3/17 |
| CH1del C220S GA LS | | | | | | |
| 1-18 VH-(G4S)5-VL G1m3 | G1m3 | 1-18 | 1-18 | Hinge_S | CH2_IE | CH3_LS_G1m3/17 |
| CH1del C220S IE LS | | | | | | |
| 1-18 VH-(G4S)5-VL G1m3 | G1m3 | 1-18 | 1-18 | Hinge_S | CH2 | CH3_cah_LS_G1m3/17 |
| CH1del C220S cah LS | | | | | | |
| 1-18 VH-(G4S)5-VL G1m3 | G1m3 | 1-18 | 1-18 | Hinge_S | CH2_GAALIE | CH3_cah_LS_G1m3/17 |
| CH1del C220S GAALIE cah LS | | | | | | |
| 1-18 VH-(G4S)5-VL G1m3 | G1m3 | 1-18 | 1-18 | Hinge_S | CH2_GAIE | CH3_cah_LS_G1m3/17 |
| CH1del C220S GAIE cah LS | | | | | | |
| 1-18 VH-(G4S)5-VL G1m3 | G1m3 | 1-18 | 1-18 | Hinge_S | CH2_GA | CH3_cah_LS_G1m3/17 |
| CH1del C220S GA cah LS | | | | | | |
| 1-18 VH-(G4S)5-VL G1m3 | G1m3 | 1-18 | 1-18 | Hinge_S | CH2_IE | CH3_cah_LS_G1m3/17 |
| CH1del C220S IE cah LS | | | | | | |
| 1-18 VH-(G4S)5-VL G1m3 | G1m3 | 1-18 | 1-18 | Hinge_S | CH2 | CH3_cak_LS_G1m3/17 |
| CH1del C220S cak LS | | | | | | |
| 1-18 VH-(G4S)5-VL G1m3 | G1m3 | 1-18 | 1-18 | Hinge_S | CH2_GAALIE | CH3_cak_LS_G1m3/17 |
| CH1del C220S GAALIE cak LS | | | | | | |
| 1-18 VH-(G4S)5-VL G1m3 | G1m3 | 1-18 | 1-18 | Hinge_S | CH2_GAIE | CH3_cak_LS_G1m3/17 |
| CH1del C220S GAIE cak LS | | | | | | |
| 1-18 VH-(G4S)5-VL G1m3 | G1m3 | 1-18 | 1-18 | Hinge_S | CH2_GA | CH3_cak_LS_G1m3/17 |
| CH1del C220S GA cak LS | | | | | | |
| 1-18 VH-(G4S)5-VL G1m3 | G1m3 | 1-18 | 1-18 | Hinge_S | CH2_IE | CH3_cak_LS_G1m3/17 |
| CH1del C220S IE cak LS | | | | | | |
| 1-18 VH-(G4S)5-VL G1m17 | G1m17 | 1-18 | 1-18 | Hinge_S | CH2 | CH3_G1m3/17 |
| CH1del C220S | | | | | | |
| 1-18 VH-(G4S)5-VL G1m17 | G1m17 | 1-18 | 1-18 | Hinge_S | CH2 | CH3_LS_G1m3/17 |
| CH1del C220S LS | | | | | | |
| 1-18 VH-(G4S)5-VL G1m17 | G1m17 | 1-18 | 1-18 | Hinge_S | CH2_GAALIE | CH3_LS_G1m3/17 |
| CH1del C220S GAALIE LS | | | | | | |
| 1-18 VH-(G4S)5-VL G1m17 | G1m17 | 1-18 | 1-18 | Hinge_S | CH2_GAIE | CH3_LS_G1m3/17 |
| CH1del C220S GAIE LS | | | | | | |
| 1-18 VH-(G4S)5-VL G1m17 | G1m17 | 1-18 | 1-18 | Hinge_S | CH2_GA | CH3_LS_G1m3/17 |
| CH1del C220S GA LS | | | | | | |
| 1-18 VH-(G4S)5-VL G1m17 | G1m17 | 1-18 | 1-18 | Hinge_S | CH2_IE | CH3_LS_G1m3/17 |
| CH1del C220S IE LS | | | | | | |
| 1-18 VH-(G4S)5-VL G1m17 | G1m17 | 1-18 | 1-18 | Hinge_S | CH2 | CH3_cah_LS_G1m3/17 |
| CH1del C220S cah LS | | | | | | |
| 1-18 VH-(G4S)5-VL G1m17 | G1m17 | 1-18 | 1-18 | Hinge_S | CH2_GAALIE | CH3_cah_LS_G1m3/17 |
| CH1del C220S GAALIE cah LS | | | | | | |
| 1-18 VH-(G4S)5-VL G1m17 | G1m17 | 1-18 | 1-18 | Hinge_S | CH2_GAIE | CH3_cah_LS_G1m3/17 |
| CH1del C220S GAIE cah LS | | | | | | |
| 1-18 VH-(G4S)5-VL G1m17 | G1m17 | 1-18 | 1-18 | Hinge_S | CH2_GA | CH3_cah_LS_G1m3/17 |
| CH1del C220S GA cah LS | | | | | | |
| 1-18 VH-(G4S)5-VL G1m17 | G1m17 | 1-18 | 1-18 | Hinge_S | CH2_IE | CH3_cah_LS_G1m3/17 |
| CH1del C220S IE cah LS | | | | | | |
| 1-18 VH-(G4S)5-VL G1m17 | G1m17 | 1-18 | 1-18 | Hinge_S | CH2 | CH3_cak_LS_G1m3/17 |
| CH1del C220S cak LS | | | | | | |
| 1-18 VH-(G4S)5-VL G1m17 | G1m17 | 1-18 | 1-18 | Hinge_S | CH2_GAALIE | CH3_cak_LS_G1m3/17 |
| CH1del C220S GAALIE cak LS | | | | | | |
| 1-18 VH-(G4S)5-VL G1m17 | G1m17 | 1-18 | 1-18 | Hinge_S | CH2_GAIE | CH3_cak_LS_G1m3/17 |
| CH1del C220S GAIE cak LS | | | | | | |
| 1-18 VH-(G4S)5-VL G1m17 | G1m17 | 1-18 | 1-18 | Hinge_S | CH2_GA | CH3_cak_LS_G1m3/17 |
| CH1del C220S GA cak LS | | | | | | |
| 1-18 VH-(G4S)5-VL G1m17 | G1m17 | 1-18 | 1-18 | Hinge_S | CH2_IE | CH3_cak_LS_G1m3/17 |
| CH1del C220S IE cak LS | | | | | | |
| 1-18 VH-(G4S)5-VL | G1m17, 1 | 1-18 | 1-18 | Hinge_S | CH2 | CH3_G1m17, 1 |
| G1m17, 1 CH1del C220S | | | | | | |
| 1-18 VH-(G4S)5-VL | G1m17, 1 | 1-18 | 1-18 | Hinge_S | CH2 | CH3_LS_G1m17, 1 |
| G1m17, 1 CH1del C220S LS | | | | | | |
| 1-18 VH-(G4S)5-VL | G1m17, 1 | 1-18 | 1-18 | Hinge_S | CH2_GAALIE | CH3_LS_G1m17, 1 |
| G1m17, 1 CH1del C220S | | | | | | |
| GAALIE LS | | | | | | |
| 1-18 VH-(G4S)5-VL | G1m17, 1 | 1-18 | 1-18 | Hinge_S | CH2_GAIE | CH3_LS_G1m17, 1 |
| G1m17, 1 CH1del C220S | | | | | | |
| GAIE LS | | | | | | |
| 1-18 VH-(G4S)5-VL | G1m17, 1 | 1-18 | 1-18 | Hinge_S | CH2_GA | CH3_LS_G1m17, 1 |
| G1m17, 1 CH1del C220S | | | | | | |
| GA LS | | | | | | |
| 1-18 VH-(G4S)5-VL | G1m17, 1 | 1-18 | 1-18 | Hinge_S | CH2_IE | CH3_LS_G1m17, 1 |
| G1m17, 1 CH1del C220S | | | | | | |
| IE LS | | | | | | |
| 1-18 VH-(G4S)5-VL | G1m17, 1 | 1-18 | 1-18 | Hinge_S | CH2 | CH3_cah_LS_G1m17, 1 |
| G1m17, 1 CH1del C220S | | | | | | |
| cah LS | | | | | | |
| 1-18 VH-(G4S)5-VL | G1m17, 1 | 1-18 | 1-18 | Hinge_S | CH2_GAALIE | CH3_cah_LS_G1m17, 1 |
| G1m17, 1 CH1del C220S | | | | | | |
| GAALIE cah LS | | | | | | |
| 1-18 VH-(G4S)5-VL | G1m17, 1 | 1-18 | 1-18 | Hinge_S | CH2_GAIE | CH3_cah_LS_G1m17, 1 |
| G1m17, 1 CH1del C220S | | | | | | |
| GAIE cah LS | | | | | | |
| 1-18 VH-(G4S)5-VL | G1m17, 1 | 1-18 | 1-18 | Hinge_S | CH2_GA | CH3_cah_LS_G1m17, 1 |
| G1m17, 1 CH1del C220S | | | | | | |
| GA cah LS | | | | | | |
| 1-18 VH-(G4S)5-VL | G1m17, 1 | 1-18 | 1-18 | Hinge_S | CH2_IE | CH3_cah_LS_G1m17, 1 |
| G1m17, 1 CH1del C220S | | | | | | |
| IE cah LS | | | | | | |
| 1-18 VH-(G4S)5-VL | G1m17, 1 | 1-18 | 1-18 | Hinge_S | CH2 | CH3_cak_LS_G1m17, 1 |
| G1m17, 1 CH1del C220S | | | | | | |
| cak LS | | | | | | |
| 1-18 VH-(G4S)5-VL | G1m17, 1 | 1-18 | 1-18 | Hinge_S | CH2_GAALIE | CH3_cak_LS_G1m17, 1 |
| G1m17, 1 CH1del C220S | | | | | | |
| GAALIE cak LS | | | | | | |
| 1-18 VH-(G4S)5-VL | G1m17, 1 | 1-18 | 1-18 | Hinge_S | CH2_GAIE | CH3_cak_LS_G1m17, 1 |
| G1m17, 1 CH1del C220S | | | | | | |
| GAIE cak LS | | | | | | |
| 1-18 VH-(G4S)5-VL | G1m17, 1 | 1-18 | 1-18 | Hinge_S | CH2_GA | CH3_cak_LS_G1m17, 1 |
| G1m17, 1 CH1del C220S | | | | | | |
| GA cak LS | | | | | | |
| 1-18 VH-(G4S)5-VL | G1m17, 1 | 1-18 | 1-18 | Hinge_S | CH2_IE | CH3_cak_LS_G1m17, 1 |
| G1m17, 1 CH1del C220S | | | | | | |
| IE cak LS | | | | | | |
| 1-18 VL-(G4S)5-VH G1m3 | G1m3 | 1-18 | 1-18 | Hinge_S | CH2 | CH3_G1m3/17 |
| CH1del C220S | | | | | | |
| 1-18 VL-(G4S)5-VH G1m3 | G1m3 | 1-18 | 1-18 | Hinge_S | CH2 | CH3_LS_G1m3/17 |
| CH1del C220S LS | | | | | | |
| 1-18 VL-(G4S)5-VH G1m3 | G1m3 | 1-18 | 1-18 | Hinge_S | CH2_GAALIE | CH3_LS_G1m3/17 |
| CH1del C220S GAALIE LS | | | | | | |
| 1-18 VL-(G4S)5-VH G1m3 | G1m3 | 1-18 | 1-18 | Hinge_S | CH2_GAIE | CH3_LS_G1m3/17 |
| CH1del C220S GAIE LS | | | | | | |
| 1-18 VL-(G4S)5-VH G1m3 | G1m3 | 1-18 | 1-18 | Hinge_S | CH2_GA | CH3_LS_G1m3/17 |
| CH1del C220S GA LS | | | | | | |
| 1-18 VL-(G4S)5-VH G1m3 | G1m3 | 1-18 | 1-18 | Hinge_S | CH2_IE | CH3_LS_G1m3/17 |
| CH1del C220S IE LS | | | | | | |
| 1-18 VL-(G4S)5-VH G1m3 | G1m3 | 1-18 | 1-18 | Hinge_S | CH2 | CH3_cah_LS_G1m3/17 |
| CH1del C220S cah LS | | | | | | |
| 1-18 VL-(G4S)5-VH G1m3 | G1m3 | 1-18 | 1-18 | Hinge_S | CH2_GAALIE | CH3_cah_LS_G1m3/17 |
| CH1del C220S GAALIE cah LS | | | | | | |
| 1-18 VL-(G4S)5-VH G1m3 | G1m3 | 1-18 | 1-18 | Hinge_S | CH2_GAIE | CH3_cah_LS_G1m3/17 |
| CH1del C220S GAIE cah LS | | | | | | |
| 1-18 VL-(G4S)5-VH G1m3 | G1m3 | 1-18 | 1-18 | Hinge_S | CH2_GA | CH3_cah_LS_G1m3/17 |
| CH1del C220S GA cah LS | | | | | | |
| 1-18 VL-(G4S)5-VH G1m3 | G1m3 | 1-18 | 1-18 | Hinge_S | CH2_IE | CH3_cah_LS_G1m3/17 |
| CH1del C220S IE cah LS | | | | | | |
| 1-18 VL-(G4S)5-VH G1m3 | G1m3 | 1-18 | 1-18 | Hinge_S | CH2 | CH3_cak_LS_G1m3/17 |
| CH1del C220S cak LS | | | | | | |
| 1-18 VL-(G4S)5-VH G1m3 | G1m3 | 1-18 | 1-18 | Hinge_S | CH2_GAALIE | CH3_cak_LS_G1m3/17 |
| CH1del C220S GAALIE cak LS | | | | | | |
| 1-18 VL-(G4S)5-VH G1m3 | G1m3 | 1-18 | 1-18 | Hinge_S | CH2_GAIE | CH3_cak_LS_G1m3/17 |
| CH1del C220S GAIE cak LS | | | | | | |
| 1-18 VL-(G4S)5-VH G1m3 | G1m3 | 1-18 | 1-18 | Hinge_S | CH2_GA | CH3_cak_LS_G1m3/17 |
| CH1del C220S GA cak LS | | | | | | |
| 1-18 VL-(G4S)5-VH G1m3 | G1m3 | 1-18 | 1-18 | Hinge_S | CH2_IE | CH3_cak_LS_G1m3/17 |
| CH1del C220S IE cak LS | | | | | | |
| 1-18 VL-(G4S)5-VH G1m17 | G1m17 | 1-18 | 1-18 | Hinge_S | CH2 | CH3_G1m3/17 |
| CH1del C220S | | | | | | |
| 1-18 VL-(G4S)5-VH G1m17 | G1m17 | 1-18 | 1-18 | Hinge_S | CH2 | CH3_LS_G1m3/17 |
| CH1del C220S LS | | | | | | |
| 1-18 VL-(G4S)5-VH G1m17 | G1m17 | 1-18 | 1-18 | Hinge_S | CH2_GAALIE | CH3_LS_G1m3/17 |
| CH1del C220S GAALIE LS | | | | | | |
| 1-18 VL-(G4S)5-VH G1m17 | G1m17 | 1-18 | 1-18 | Hinge_S | CH2_GAIE | CH3_LS_G1m3/17 |
| CH1del C220S GAIE LS | | | | | | |
| 1-18 VL-(G4S)5-VH G1m17 | G1m17 | 1-18 | 1-18 | Hinge_S | CH2_GA | CH3_LS_G1m3/17 |
| CH1del C220S GA LS | | | | | | |
| 1-18 VL-(G4S)5-VH G1m17 | G1m17 | 1-18 | 1-18 | Hinge_S | CH2_IE | CH3_LS_G1m3/17 |
| CH1del C220S IE LS | | | | | | |
| 1-18 VL-(G4S)5-VH G1m17 | G1m17 | 1-18 | 1-18 | Hinge_S | CH2 | CH3_cah_LS_G1m3/17 |
| CH1del C220S cah LS | | | | | | |
| 1-18 VL-(G4S)5-VH G1m17 | G1m17 | 1-18 | 1-18 | Hinge_S | CH2_GAALIE | CH3_cah_LS_G1m3/17 |
| CH1del C220S GAALIE cah LS | | | | | | |
| 1-18 VL-(G4S)5-VH G1m17 | G1m17 | 1-18 | 1-18 | Hinge_S | CH2_GAIE | CH3_cah_LS_G1m3/17 |
| CH1del C220S GAIE cah LS | | | | | | |
| 1-18 VL-(G4S)5-VH G1m17 | G1m17 | 1-18 | 1-18 | Hinge_S | CH2_GA | CH3_cah_LS_G1m3/17 |
| CH1del C220S GA cah LS | | | | | | |
| 1-18 VL-(G4S)5-VH G1m17 | G1m17 | 1-18 | 1-18 | Hinge_S | CH2_IE | CH3_cah_LS_G1m3/17 |
| CH1del C220S IE cah LS | | | | | | |
| 1-18 VL-(G4S)5-VH G1m17 | G1m17 | 1-18 | 1-18 | Hinge_S | CH2 | CH3_cak_LS_G1m3/17 |
| CH1del C220S cak LS | | | | | | |
| 1-18 VL-(G4S)5-VH G1m17 | G1m17 | 1-18 | 1-18 | Hinge_S | CH2_GAALIE | CH3_cak_LS_G1m3/17 |
| CH1del C220S GAALIE cak LS | | | | | | |
| 1-18 VL-(G4S)5-VH G1m17 | G1m17 | 1-18 | 1-18 | Hinge_S | CH2_GAIE | CH3_cak_LS_G1m3/17 |
| CH1del C220S GAIE cak LS | | | | | | |
| 1-18 VL-(G4S)5-VH G1m17 | G1m17 | 1-18 | 1-18 | Hinge_S | CH2_GA | CH3_cak_LS_G1m3/17 |
| CH1del C220S GA cak LS | | | | | | |
| 1-18 VL-(G4S)5-VH G1m17 | G1m17 | 1-18 | 1-18 | Hinge_S | CH2_IE | CH3_cak_LS_G1m3/17 |
| CH1del C220S IE cak LS | | | | | | |
| 1-18 VL-(G4S)5-VH | G1m17, 1 | 1-18 | 1-18 | Hinge_S | CH2 | CH3_G1m17, 1 |
| G1m17, 1 CH1del C220S | | | | | | |
| 1-18 VL-(G4S)5-VH | G1m17, 1 | 1-18 | 1-18 | Hinge_S | CH2 | CH3_LS_G1m17, 1 |
| G1m17, 1 CH1del C220S LS | | | | | | |
| 1-18 VL-(G4S)5-VH | G1m17, 1 | 1-18 | 1-18 | Hinge_S | CH2_GAALIE | CH3_LS_G1m17, 1 |
| G1m17, 1 CH1del C220S | | | | | | |
| GAALIE LS | | | | | | |
| 1-18 VL-(G4S)5-VH | G1m17, 1 | 1-18 | 1-18 | Hinge_S | CH2_GAIE | CH3_LS_G1m17, 1 |
| G1m17, 1 CH1del C220S | | | | | | |
| GAIE LS | | | | | | |
| 1-18 VL-(G4S)5-VH | G1m17, 1 | 1-18 | 1-18 | Hinge_S | CH2_GA | CH3_LS_G1m17, 1 |
| G1m17, 1 CH1del C220S | | | | | | |
| GA LS | | | | | | |
| 1-18 VL-(G4S)5-VH | G1m17, 1 | 1-18 | 1-18 | Hinge_S | CH2_IE | CH3_LS_G1m17, 1 |
| G1m17, 1 CH1del C220S | | | | | | |
| IE LS | | | | | | |
| 1-18 VL-(G4S)5-VH | G1m17, 1 | 1-18 | 1-18 | Hinge_S | CH2 | CH3_cah_LS_G1m17, 1 |
| G1m17, 1 CH1del C220S | | | | | | |
| cah LS | | | | | | |
| 1-18 VL-(G4S)5-VH | G1m17, 1 | 1-18 | 1-18 | Hinge_S | CH2_GAALIE | CH3_cah_LS_G1m17, 1 |
| G1m17, 1 CH1del C220S | | | | | | |
| GAALIE cah LS | | | | | | |
| 1-18 VL-(G4S)5-VH | G1m17, 1 | 1-18 | 1-18 | Hinge_S | CH2_GAIE | CH3_cah_LS_G1m17, 1 |
| G1m17, 1 CH1del C220S | | | | | | |
| GAIE cah LS | | | | | | |
| 1-18 VL-(G4S)5-VH | G1m17, 1 | 1-18 | 1-18 | Hinge_S | CH2_GA | CH3_cah_LS_G1m17, 1 |
| G1m17, 1 CH1del C220S | | | | | | |
| GA cah LS | | | | | | |
| 1-18 VL-(G4S)5-VH | G1m17, 1 | 1-18 | 1-18 | Hinge_S | CH2_IE | CH3_cah_LS_G1m17, 1 |
| G1m17, 1 CH1del C220S | | | | | | |
| IE cah LS | | | | | | |
| 1-18 VL-(G4S)5-VH | G1m17, 1 | 1-18 | 1-18 | Hinge_S | CH2 | CH3_cak_LS_G1m17, 1 |
| G1m17, 1 CH1del C220S | | | | | | |
| cak LS | | | | | | |
| 1-18 VL-(G4S)5-VH | G1m17, 1 | 1-18 | 1-18 | Hinge_S | CH2_GAALIE | CH3_cak_LS_G1m17, 1 |
| G1m17, 1 CH1del C220S | | | | | | |
| GAALIE cak LS | | | | | | |
| 1-18 VL-(G4S)5-VH | G1m17, 1 | 1-18 | 1-18 | Hinge_S | CH2_GAIE | CH3_cak_LS_G1m17, 1 |
| G1m17, 1 CH1del C220S | | | | | | |
| GAIE cak LS | | | | | | |
| 1-18 VL-(G4S)5-VH | G1m17, 1 | 1-18 | 1-18 | Hinge_S | CH2_GA | CH3_cak_LS_G1m17, 1 |
| G1m17, 1 CH1del C220S | | | | | | |
| GA cak LS | | | | | | |
| 1-18 VL-(G4S)5-VH | G1m17, 1 | 1-18 | 1-18 | Hinge_S | CH2_IE | CH3_cak_LS_G1m17, 1 |
| G1m17, 1 CH1del C220S | | | | | | |
| IE cak LS | | | | | | |

### III. Polyribonucleotides

### A. Exemplary Polyribonucleotides Features

[0535] Polyribonucleotides described herein encode an immunoglobulin chain of an antibody agent as described herein (e.g., HIV antibody agents). Additionally, polyribonucleotides described herein, in some embodiments, include other elements such as a secretion signal-encoding region. In some embodiments, polyribonucleotides described herein can comprise a nucleotide sequence that encodes a 5′UTR of interest and/or a 3′ UTR of interest. In some embodiments, polynucleotides described herein can comprise a nucleotide sequence that encodes a polyA tail. In some embodiments, polyribonucleotides described herein may comprise a 5′ cap, which may be incorporated during transcription, or joined to a polyribonucleotide post-transcription.

### 1. Secretion Signal-Encoding Region

[0536] According to certain embodiments, a signal peptide (or signal sequence) is fused, either directly or through a linker, to an encoded immunoglobulin chain of an antibody agent described herein.

[0537] In some embodiments, an open reading frame of the RNA described herein encodes an immunoglobulin chain of an antibody agent described herein with a signal sequence, e.g., that is functional in mammalian cells. In some embodiments, a utilized signal sequence is “intrinsic” in that it is, in nature, associated with (e.g., linked to) an immunoglobulin chain of an antibody agent or portion thereof.

[0538] In some embodiments, a utilized signal sequence is heterologous to an immunoglobulin chain of an antibody agent or portion thereof—e.g., is not naturally part of an immunoglobulin chain of an antibody agent or portion thereof.

[0539] In some embodiments, signal peptides are sequences, which are typically characterized by a length of about 15 to 30 amino acids.

[0540] In many embodiments, signal peptides are positioned at the N-terminus of an immunoglobulin chain of an antibody agent or portion thereof, without being limited thereto. In some embodiments, signal peptides preferably allow the transport of an immunoglobulin chain of an antibody agent or portion thereof encoded by RNAs of the present disclosure with which they are associated into a defined cellular compartment, preferably the cell surface, the endoplasmic reticulum (ER) or the endosomal-lysosomal compartment.

[0541] In some embodiments, a polyribonucleotide, as provided herein, that encodes an immunoglobulin chain of an antibody agent (e.g., an HIV antibody agent) may comprise a ribonucleic acid sequence encoding a secretion signal. In some embodiments, a ribonucleic acid sequence encoding a secretion signal allows an immunoglobulin chain of an antibody agent encoded by the polyribonucleotide to be secreted upon translation by cells, e.g., present in a subject, thus yielding a plasma concentration of a biologically active HIV antibody agent.

[0542] In some embodiments, a ribonucleic acid sequence encoding a secretion signal included in a polyribonucleotide consists of or comprises a nucleotide sequence that encodes a human secretion signal. For example, in some embodiments, such a human secretion signal may be or comprises the amino acid sequence of MDWIWRILFLVGAATGAHS (husec2; SEQ ID NO: 1). In some embodiments, a ribonucleic acid sequence encoding a secretion signal included in a polyribonucleotide consists of or comprises a nucleotide sequence that encodes a non-human secretion signal. In some embodiments, a ribonucleic acid sequence encoding a secretion signal included in a polyribonucleotide encoding a heavy chain domain of an antibody agent may comprise a ribonucleic acid sequence that encodes a human secretion signal amino acid sequence. In some embodiments, a polyribonucleotide encoding a human secretion signal comprises SEQ ID NO: 2 or SEQ ID NO: 4. In some embodiments, a ribonucleic acid sequence encoding a secretion signal included in a polyribonucleotide encoding a light chain domain of a HIV antibody agent may comprise a nucleotide sequence that encodes a human secretion signal amino acid sequence of MDWIWRILFLVGAATGAHS (husec2; SEQ ID NO: 1). In some embodiments, a ribonucleic acid sequence encoding a secretion signal included in a polyribonucleotide encoding a light chain domain of a HIV antibody agent may comprise a nucleotide sequence that encodes a human secretion signal amino acid sequence. In some embodiments, a polyribonucleotide encoding a human secretion signal comprises SEQ ID NO: 2 or SEQ ID NO: 4.

[0543] In some embodiments, an RNA sequence encodes an immunoglobulin chain of an antibody agent as described herein may comprise or otherwise be linked to a signal sequence (e.g., secretory sequence), such as those listed in Table 24, or a sequence having 1, 2, 3, 4, or 5 amino acid differences relative thereto. In some embodiments, a signal sequence such as MRVMAPRTLILLLSGALALTETWAGS (SEQ ID NO: 883), or a sequence having 1, 2, 3, 4, or at the most 5 amino acid differences relative thereto is utilized. In some embodiments, a sequence such as MRVMAPRTLILLLSGALALTETWAGS (SEQ ID NO: 883, or a sequence having 1, 2, 3, 4, or at the most 5 amino acid differences relative thereto, is utilized. In some embodiments, a signal sequence such as MEFGLSWLFLVAILKGVQC (SEQ ID NO: 886), or a sequence having 1, 2, 3, 4, or at the most 5 amino acid differences relative thereto is utilized. In some embodiments, a sequence such as MEFGLSWLFLVAILKGVQC (SEQ ID NO: 886), or a sequence having 1, 2, 3, 4, or at the most 5 amino acid differences relative thereto, is utilized.

[0544] In some embodiments, a signal sequence is selected from those included in the Table 24 below, or a fragment or variant thereof:

TABLE 24
Exemplary Signal sequences

| | SEQ ID | |
|---|---|---|
| Signal | NO: | Sequence (Amino Acid) |
| HSV-1 gD SP | 867 | MGGAAARLGAVILFVVIVGLHGVRSKY |
| HSV-2 gD SP | 868 | MGRLTSGVGTAALLVVAVGLRVVCA |
| HSV-2 | 869 | MGRLTSGVGTAALLVVAVGLRVVCAKYA |
| SARS-CoV-2-S | 870 | MFVFLVLLPLVSSQCVNLT |
| human Ig heavy chain signal | 871 | MDWIWRILFLVGAATGAHSQM |
| peptide | | |
| human Ig heavy chain signal | 872 | MDWTWRVFCLLAVAPGAHS |
| peptide | | |
| HulgGk signal peptide | 873 | METPAQLLFLLLLWLPDTTG |
| IgE heavy chain epsilon-1signal | 874 | MDWTWILFLVAAATRVHS |
| peptide | | |
| Japanese encephalitis PRM | 875 | MLGSNSGQRVVFTILLLLVAPAYS |
| signal sequence | | |
| VSVg protein signal sequence | 876 | MKCLLYLAFLFIGVNCA |
| Exemplary signal sequence | 877 | MDWTWILFLVAAATRVHS |
| Exemplary signal sequence | 878 | ETPAQLLFLLLLWLPDTTG |
| Exemplary signal sequence | 879 | MLGSNSGQRVVFTILLLLVAPAYS |
| Exemplary signal sequence | 880 | MKCLLYLAFLFIGVNCA |
| Exemplary signal sequence | 881 | MWLVSLAIVTACAGA |
| Exemplary signal sequence | 882 | MFVFLVLLPLVSSQC |
| husec Signal peptide | 883 | MRVMAPRTLILLLSGALALTETWAGS |
| husec3 Signal peptide | 886 | MEFGLSWLFLVAILKGVQC |

### 2. 5′ Cap

[0545] A structural feature of mRNAs is cap structure at five-prime end (5′). Natural eukaryotic mRNA comprises a 7-methylguanosine cap linked to the mRNA via a 5′ to 5′-triphosphate bridge resulting in cap0 structure (m7GpppN). In most eukaryotic mRNA and some viral mRNA, further modifications can occur at the 2′-hydroxy-group (2′-OH) (e.g., the 2′-hydroxyl group may be methylated to form 2′-O-Me) of the first and subsequent nucleotides producing “cap1” and “cap2” five-prime ends, respectively). Diamond, et al., (2014) Cytokine & growth Factor Reviews, 25:543-550 reported that cap0-mRNA cannot be translated as efficiently as cap1-mRNA in which the role of 2′-O-Me in the penultimate position at the mRNA 5′ end is determinant. Lack of the 2′-O-met has been shown to trigger innate immunity and activate IFN response. Daffis, et al. (2010) Nature, 468:452-456; and Züst et al. (2011) Nature Immunology, 12:137-143.

[0546] RNA capping is well researched and is described, e.g., in Decroly E et al. (2012) Nature Reviews 10:51-65; and in Ramanathan A. et al., (2016) Nucleic Acids Res; 44 (16): 7511-7526, the entire contents of each of which is hereby incorporated by reference. For example, in some embodiments, a 5′-cap structure which may be suitable in the context of the present invention is a cap0 (methylation of the first nucleobase, e.g. m7GpppN), cap1 (additional methylation of the ribose of the adjacent nucleotide of m7GpppN), cap2 (additional methylation of the ribose of the 2nd nucleotide downstream of the m7GpppN), cap3 (additional methylation of the ribose of the 3rd nucleotide downstream of the m7GpppN), cap4 (additional methylation of the ribose of the 4^{th} nucleotide downstream of the m7GpppN), ARCA (“anti-reverse cap analogue”), modified ARCA (e.g. phosphothioate modified ARCA), inosine, N1-methyl-guanosine, 2′-fluoro-guanosine, 7-deaza-guanosine, 8-oxo-guanosine, 2-amino-guanosine, LNA-guanosine, and 2-azido-guanosine.

[0547] The term “5′-cap” as used herein refers to a structure found on the 5′-end of an RNA, e.g., mRNA, and generally includes a guanosine nucleotide connected to an RNA, e.g., mRNA, via a 5′- to 5′-triphosphate linkage (also referred to as Gppp or G(5′)ppp(5′)). In some embodiments, a guanosine nucleoside included in a 5′ cap may be modified, for example, by methylation at one or more positions (e.g., at the 7-position) on a base (guanine), and/or by methylation at one or more positions of a ribose. In some embodiments, a guanosine nucleoside included in a 5′ cap comprises a 3′O methylation at a ribose (3′OMeG). In some embodiments, a guanosine nucleoside included in a 5′ cap comprises methylation at the 7-position of guanine (m7G). In some embodiments, a guanosine nucleoside included in a 5′ cap comprises methylation at the 7-position of guanine and a 3′ O methylation at a ribose (m7(3′OMeG)). It will be understood that the notation used in the above paragraph, e.g., “(m₂^{7,3′-O})G” or “m7(3′OMeG)”, applies to other structures described herein.

[0548] In some embodiments, providing an RNA with a 5′-cap disclosed herein may be achieved by in vitro transcription, in which a 5′-cap is co-transcriptionally expressed into an RNA strand, or may be attached to an RNA post-transcriptionally using capping enzymes. In some embodiments, co-transcriptional capping with a cap disclosed improves the capping efficiency of an RNA compared to co-transcriptional capping with an appropriate reference comparator. In some embodiments, improving capping efficiency can increase a translation efficiency and/or translation rate of an RNA, and/or increase expression of an encoded polypeptide. In some embodiments, alterations to polynucleotides generates a non-hydrolyzable cap structure which can, for example, prevent decapping and increase RNA half-life.

[0549] In some embodiments, a utilized 5′ caps is a cap0, a cap1, or cap2 structure. See, e.g., FIG. 1 of Ramanathan A et al., and FIG. 1 of Decroly E et al., each of which is incorporated herein by reference in its entirety. See, e.g., FIG. 1 of Ramanathan A et al., and FIG. 1 of Decroly E et al., each of which is incorporated herein by reference in its entirety. In some embodiments, an RNA described herein comprises a cap1 structure. In some embodiments, an RNA described herein comprises a cap2.

[0550] In some embodiments, an RNA described herein comprises a cap0 structure. In some embodiments, a cap0 structure comprises a guanosine nucleoside methylated at the 7-position of guanine ((m⁷)G). In some embodiments, such a cap0 structure is connected to an RNA via a 5′- to 5′-triphosphate linkage and is also referred to herein as (m⁷)Gppp. In some embodiments, a cap0 structure comprises a guanosine nucleoside methylated at the 2′-position of the ribose of guanosine In some embodiments, a cap0 structure comprises a guanosine nucleoside methylated at the 3′-position of the ribose of guanosine. In some embodiments, a guanosine nucleoside included in a 5′ cap comprises methylation at the 7-position of guanine and at the 2′-position of the ribose ((m₂^{7,2′-O})G). In some embodiments, a guanosine nucleoside included in a 5′ cap comprises methylation at the 7-position of guanine and at the 2′-position of the ribose ((m₂^{7,3′-O})G).

[0551] In some embodiments, a cap1 structure comprises a guanosine nucleoside methylated at the 7-position of guanine ((m7)G) and optionally methylated at the 2′ or 3′ position pf the ribose, and a 2′O methylated first nucleotide in an RNA ((m^{2′-O})N₁). In some embodiments, a cap1 structure comprises a guanosine nucleoside methylated at the 7-position of guanine ((m⁷)G) and the 3′ position of the ribose, and a 2′O methylated first nucleotide in an RNA ((m^{2′-O})N₁). In some embodiments, a cap1 structure is connected to an RNA via a 5′- to 5′-triphosphate linkage and is also referred to herein as, e.g., ((m7)Gppp(^{2′-O})N₁) or (m₂^{7,3′-O})Gppp(^{2′-O})N₁), wherein N₁ is as defined and described herein. In some embodiments, a cap1 structure comprises a second nucleotide, N₂, which is at position 2 and is chosen from A, G, C, or U, e.g., (m⁷)Gppp(^{2′-O})N₁pN₂ or (m₂^{7,3′-O})Gppp(^{2′-O})N₁pN₂, wherein each of N1 and N2 is as defined and described herein.

[0552] In some embodiments, a cap2 structure comprises a guanosine nucleoside methylated at the 7-position of guanine ((m⁷)G) and optionally methylated at the 2′ or 3′ position pf the ribose, and a 2′O methylated first and second nucleotides in an RNA ((m^{2′-O)}N₁p(m^{2′-O)N}₂). In some embodiments, a cap2 structure comprises a guanosine nucleoside methylated at the 7-position of guanine ((m⁷)G) and the 3′ position of the ribose, and a 2′O methylated first and second nucleotide in an RNA. In some embodiments, a cap2 structure is connected to an RNA via a 5′- to 5′-triphosphate linkage and is also referred to herein as, e.g., ((m7)Gppp(^{2′-O})N₁p(^{2′-O})N₂) or (m₂^{7,3′-O})Gppp(^{2′-O})N₁p(^{2′-O})N₂), wherein each of N₁ and N₂ is as defined and described herein.

[0553] In some embodiments, the 5′ cap is a dinucleotide cap structure. In some embodiments, the 5′ cap is a dinucleotide cap structure comprising N₁, wherein N₁ is as defined and described herein. In some embodiments, the 5′ cap is a dinucleotide cap G*N₁, wherein N₁ is as defined above and herein, and G* comprises a structure of formula (I):

[chemical structure]

[0554] or a salt thereof,
[0555] wherein
   [0556] each R² and R³ is —OH or —OCH₃; and
   [0557] X is O or S.

[0558] In some embodiments, R² is —OH. In some embodiments, R² is —OCH₃. In some embodiments, R³ is —OH. In some embodiments, R³ is —OCH₃. In some embodiments, R² is —OH and R³ is —OH. In some embodiments, R² is —OH and R³ is —CH₃. In some embodiments, R² is —CH₃ and R³ is —OH. In some embodiments, R² is —CH₃ and R³ is —CH₃.

[0559] In some embodiments, X is O. In some embodiments, X is S.

[0560] In some embodiments, the 5′ cap is a dinucleotide cap0 structure (e.g., (m⁷)GpppN₁, (m₂^{7,2′-O})GpppN₁, (m₂^{7,3′-O})GpppN₁, (m⁷)GppSpN₁, (m₂^{7,2′-O})GppSpN₁, or (m₂^{7,3′-O})GppSpN₁), wherein N₁ is as defined and described herein. In some embodiments, the 5′ cap is a dinucleotide cap0 structure (e.g., (m⁷)GpppN₁, (m₂^{7,2′-O})GpppN₁, (m₂^{7,3′-O})GpppN₁, (m⁷)GppSpN₁, (m₂^{7,2′-O})GppSpN₁, or (m₂^{7,3′-O})GppSpN₁), wherein N1 is G. In some embodiments, the 5′ cap is a dinucleotide cap0 structure (e.g., (m⁷)GpppN₁, (m₂^{7,2′-O})GpppN₁, (m₂^{7,3′-O})GpppN₁, (m⁷)GppSpN₁, (m₂^{7,2′-O})GppSpN₁, or (m₂^{7,3′-O})GppSpN₁), wherein N₁ is A, U, or C. In some embodiments, the 5′ cap is a dinucleotide cap1 structure (e.g., (m⁷)Gppp(m^{2′-O})N₁, (m₂^{7,2′-O})Gppp(m^{2′-O})N₁, (m₂^{7,3′-O})Gppp(m^{2′-O})N₁, (m⁷)GppSp(m^{2′-O})N₁, (m₂^{7,2′-O})GppSp(m^{2′-O})N₁, or (m₂^{7,3′-O})GppSp(m^{2′-O})N₁), wherein N₁ is as defined and described herein. In some embodiments, the 5′ cap is selected from the group consisting of (m⁷)GpppG (“Ecap0”), (m⁷)Gppp(m^{2′-O})G (“Ecap1”), (m₂^{7,3′-O})GpppG (“ARCA” or “D1”), and (m₂^{7,2′-O})GppSpG (“beta-S-ARCA”). In some embodiments, the 5′ cap is (m⁷)GpppG (“Ecap0”), having a structure:

[chemical structure]

or a salt thereof.

[0561] In some embodiments, the 5′ cap is (m⁷)Gppp(m^{2′-O})G (“Ecap1”), having a structure:

[chemical structure]

or a salt thereof.

[0562] In some embodiments, the 5′ cap is (m₂^{7,3′-O})GpppG (“ARCA” or “D1”), having a structure:

[chemical structure]

or a salt thereof.

[0563] In some embodiments, the 5′ cap is (m₂^{7,2′-O})GppSpG (“beta-S-ARCA”), having a structure:

[chemical structure]

or a salt thereof.

[0564] In some embodiments, the 5′ cap is a trinucleotide cap structure. In some embodiments, the 5′ cap is a trinucleotide cap structure comprising N₁pN₂, wherein N₁ and N₂ are as defined and described herein. In some embodiments, the 5′ cap is a dinucleotide cap G*N₁pN₂, wherein N₁ and N₂ are as defined above and herein, and G* comprises a structure of formula (I):

[chemical structure]

or a salt thereof, wherein R², R³, and X are as defined and described herein.

[0565] In some embodiments, the 5′ cap is a trinucleotide cap0 structure (e.g. (m⁷)GpppN₁pN₂, (m₂^{7,2′-O})GpppN₁pN₂, or (m₂^{7,3′-O})GpppN₁pN₂), wherein N₁ and N₂ are as defined and described herein). In some embodiments, the 5′ cap is a trinucleotide cap1 structure (e.g., (m⁷)Gppp(m^{2′-O})N₁pN₂, (m₂^{7,2′-O})Gppp(m^{2′-O})N₁pN₂, (m₂^{7,3′-O})Gppp(m^{2′-O)N}₁pN₂), wherein N₁ and N₂ are as defined and described herein. In some embodiments, the 5′ cap is a trinucleotide cap2 structure (e.g., (m⁷)Gppp(m^{2′-O})N₁p(m^{2′-O})N₂, (m₂^{7,2′-O})Gppp(m^{2′-O})N₁p(m^{2′-O})N₂, (m₂^{7,3′-O})Gppp(m^{2′-O})N₁p(m^{2′-O})N₂), wherein N₁ and N₂ are as defined and described herein. In some embodiments, the 5′ cap is selected from the group consisting of (m₂^{7,3′-O})Gppp(m^{2′-O})ApG (“CleanCap AG”, “CC413”), (m₂^{7,3′-O})Gppp(m^{2′-O})GpG (“CleanCap GG”), (m⁷)Gppp(m^{2′-O})ApG, (m⁷)Gppp(m^{2′-O})GpG, (m₂^{7,3′-O})Gppp(m₂^{6,2′-O})ApG, and (m⁷)Gppp(m^{2′-O})ApU.

[0566] In some embodiments, the 5′ cap is (m₂^{7,3′-O})Gppp(m^{2′-O})ApG (“CleanCap AG”, “CC413”), having a structure:

[chemical structure]

or a salt thereof.

[0567] In some embodiments, the 5′ cap is (m₂^{7,3′-O})Gppp(m^{2′-O})GpG (“CleanCap GG”), having a structure:

[chemical structure]

or a salt thereof.

[0568] In some embodiments, the 5′ cap is (m⁷)Gppp(m^{2′-O})ApG, having a structure:

[chemical structure]

or a salt thereof.

[0569] In some embodiments, the 5′ cap is (m⁷)Gppp(m^{2′-O})GpG, having a structure:

[chemical structure]

or a salt thereof.

[0570] In some embodiments, the 5′ cap is (m₂^{7,3′-O})Gppp(m₂^{6,2′-O})ApG, having a structure:

[chemical structure]

or a salt thereof.

[0571] In some embodiments, the 5′ cap is (m⁷)Gppp(m^{2′-O})ApU, having a structure:

[chemical structure]

or a salt thereof.

[0572] In some embodiments, the 5′ cap is a tetranucleotide cap structure. In some embodiments, the 5′ cap is a tetranucleotide cap structure comprising N₁pN₂pN₃, wherein N₁, N₂, and N₃ are as defined and described herein. In some embodiments, the 5′ cap is a tetranucleotide cap G*N₁pN₂pN₃, wherein N₁, N₂, and N₃ are as defined above and herein, and G* comprises a structure of formula (I):

[chemical structure]

or a salt thereof, wherein R², R³, and X are as defined and described herein.

[0573] In some embodiments, the 5′ cap is a tetranucleotide cap0 structure (e.g. (m⁷)GpppN₁pN₂pN₃, (m₂^{7,2′-O})GpppN₁pN₂pN₃, or (m₂^{7,3′-O})GpppN₁N₂pN₃), wherein N₁, N₂, and N₃ are as defined and described herein). In some embodiments, the 5′ cap is a tetranucleotide Cap1 structure (e.g., (m⁷)Gppp(m^{2′-O})N₁pN₂pN₃, (m₂^{7,2′-O})Gppp(m^{2′-O})N₁pN₂pN₃, (m₂^{7,3′-O})Gppp(m^{2′-O})N₁pN₂N₃), wherein N₁, N₂, and N₃ are as defined and described herein. In some embodiments, the 5′ cap is a tetranucleotide Cap2 structure (e.g., (m⁷)Gppp(m^{2′-O})N₁p(m^{2′-O})N₂pN₃, (m₂^{7,2′-O})Gppp(m^{2′-O})N₁p(m^{2′-O})N₂pN₃, (m₂^{7,3′-O})Gppp(m^{2′-O)N}₁p(m^{2′-O})N₂pN₃), wherein N₁, N₂, and N₃ are as defined and described herein. In some embodiments, the 5′ cap is selected from the group consisting of (m₂^{7,3′-O})Gppp(m^{2′-O})Ap(m^{2′-O)GpG, (m}₂^{7,3′-O})Gppp(m^{2′-O})Gp(m^{2′-O})GpC, (m⁷)Gppp(m^{2′-O})Ap(m^{2′-O})UpA, and (m⁷)Gppp(m^{2′-O})Ap(m^{2′-O})GpG.

[0574] In some embodiments, the 5′ cap is (m₂^{7,3′-O})Gppp(m^{2′-O})Ap(m^{2′-O})GpG, having a structure:

[chemical structure]

or a salt thereof.

[0575] In some embodiments, the 5′ cap is (m₂^{7,3′-O})Gppp(m^{2′-O})Gp(m^{2′-O})GpC, having a structure:

[chemical structure]

or a salt thereof.

[0576] In some embodiments, the 5′ cap is (m⁷)Gppp(m^{2′-O})Ap(m^{2′-O})UpA, having a structure:

[chemical structure]

or a salt thereof.

[0577] In some embodiments, the 5′ cap is (m⁷)Gppp(m^{2′-O})Ap(m^{2′-O})GpG, having a structure:

[chemical structure]

or a salt thereof.

### 3. Cap Proximal Sequences

[0578] In some embodiments, a 5′ UTR utilized in accordance with the present disclosure comprises a cap proximal sequence, e.g., as disclosed herein. In some embodiments, a cap proximal sequence comprises a sequence adjacent to a 5′ cap. In some embodiments, a cap proximal sequence comprises nucleotides in positions +1, +2, +3, +4, and/or +5 of an RNA polynucleotide.

[0579] In some embodiments, a cap structure comprises one or more polynucleotides of a cap proximal sequence. In some embodiments, a cap structure comprises an m⁷ Guanosine cap and nucleotide +1 (N₁) of an RNA polynucleotide. In some embodiments, a cap structure comprises an m⁷ Guanosine cap and nucleotide +2 (N₂) of an RNA polynucleotide. In some embodiments, a cap structure comprises an m7 Guanosine cap and nucleotides +1 and +2 (N₁ and N₂) of an RNA polynucleotide. In some embodiments, a cap structure comprises an m⁷ Guanosine cap and nucleotides +1, +2, and +3 (N₁, N₂, and N₃) of an RNA polynucleotide.

[0580] Those skilled in the art, reading the present disclosure, will appreciate that, in some embodiments, one or more residues of a cap proximal sequence (e.g., one or more of residues +1, +2, +3, +4, and/or +5) may be included in an RNA by virtue of having been included in a cap entity (e.g., a cap1 or cap2 structure, etc.); alternatively, in some embodiments, at least some of the residues in a cap proximal sequence may be enzymatically added (e.g., by a polymerase such as a T7 polymerase). For example, in certain exemplified embodiments where a m₂^{7,3′-O}Gppp(m₁^{2′-O})ApG cap is utilized, +1 (i.e., N₁) and +2 (i.e. N₂) are the (m₁^{2′-O})A and G residues of the cap, and +3, +4, and +5 are added by polymerase (e.g., T7 polymerase).

[0581] In some embodiments, the 5′ cap is a dinucleotide cap structure, wherein the cap proximal sequence comprises N₁ of the 5′ cap, where N₁ is any nucleotide, e.g., A, C, G or U. In some embodiments, the 5′ cap is a trinucleotide cap structure (e.g., the trinucleotide cap structures described above and herein), wherein the cap proximal sequence comprises N₁ and N₂ of the 5′ cap, wherein N₁ and N₂ are independently any nucleotide, e.g., A, C, G or U. In some embodiments, the 5′ cap is a tetranucleotide cap structure (e.g., the trinucleotide cap structures described above and herein), wherein the cap proximal sequence comprises N₁, N₂, and N₃ of the 5′ cap, wherein N₁, N₂, and N₃ are any nucleotide, e.g., A, C, G or U.

[0582] In some embodiments, e.g., where the 5′ cap is a dinucleotide cap structure, a cap proximal sequence comprises N₁ of a the 5′ cap, and N₂, N₃, N₄ and N₅, wherein N₁ to N₅ correspond to positions +1, +2, +3, +4, and/or +5 of an RNA polynucleotide. In some embodiments, e.g., where the 5′ cap is a trinucleotide cap structure, a cap proximal sequence comprises N₁ and N₂ of a the 5′ cap, and N₃, N₄ and N₅, wherein N₁ to N₅ correspond to positions +1, +2, +3, +4, and/or +5 of an RNA polynucleotide. In some embodiments, e.g., where the 5′ cap is a tetranucleotide cap structure, a cap proximal sequence comprises N₁, N₂, and N₃ of a the 5′ cap, and N₄ and N₅, wherein N₁ to N₅ correspond to positions +1, +2, +3, +4, and/or +5 of an RNA polynucleotide.

[0583] In some embodiments, N₁ is A. In some embodiments, N₁ is C. In some embodiments, N₁ is G. In some embodiments, N₁ is U. In some embodiments, N₂ is A. In some embodiments, N₂ is C. In some embodiments, N₂ is G. In some embodiments, N₂ is U. In some embodiments, N₃ is A. In some embodiments, N₃ is C. In some embodiments, N₃ is G. In some embodiments, N₃ is U. In some embodiments, N₄ is A. In some embodiments, N₄ is C. In some embodiments, N₄ is G. In some embodiments, N₄ is U. In some embodiments, N₅ is A. In some embodiments, N₅ is C. In some embodiments, N₅ is G. In some embodiments, N₅ is U. It will be understood that, each of the embodiments described above and herein (e.g., for N₁ through N₅) may be taken singly or in combination and/or may be combined with other embodiments of variables described above and herein (e.g., 5′ caps).

### 4. 5′ UTR

[0584] In some embodiments, a nucleic acid (e.g., DNA, RNA) utilized in accordance with the present disclosure a 5′-UTR. In some embodiments, 5′-UTR may comprise a plurality of distinct sequence elements; in some embodiments, such plurality may be or comprise multiple copies of one or more particular sequence elements (e.g., as may be from a particular source or otherwise known as a functional or characteristic sequence element). In some embodiments a 5′ UTR comprises multiple different sequence elements.

[0585] The term “untranslated region” or “UTR” is commonly used in the art to a region in a DNA molecule which is transcribed but is not translated into an amino acid sequence, or to the corresponding region in an RNA polynucleotide, such as an mRNA molecule. An untranslated region (UTR) can be present 5′ (upstream) of an open reading frame (5′-UTR) and/or 3′ (downstream) of an open reading frame (3′-UTR). As used herein, the terms “five prime untranslated region” or “5′ UTR” refer to a sequence of a polyribonucleotide between the 5′ end of the polyribonucleotide (e.g., a transcription start site) and a start codon of a coding region of the polyribonucleotide. In some embodiments, “5′ UTR” refers to a sequence of a polyribonucleotide that begins at the 5′ end of the polyribonucleotide (e.g., a transcription start site) and ends one nucleotide (nt) before a start codon (usually AUG) of a coding region of the polyribonucleotide, e.g., in its natural context. In some embodiments, a 5′ UTR comprises a Kozak sequence. A 5′-UTR is downstream of the 5′-cap (if present), e.g., directly adjacent to the 5′-cap. In some embodiments, a 5′ UTR disclosed herein comprises a cap proximal sequence, e.g., as defined and described herein. In some embodiments, a cap proximal sequence comprises a sequence adjacent to a 5′ cap.

[0586] Exemplary 5′ UTRs include a human alpha globin (hAg) 5′UTR or a fragment thereof, a TEV 5′ UTR or a fragment thereof, a HSP70 5′ UTR or a fragment thereof, or a c-June 5′ UTR or a fragment thereof.

[0587] In some embodiments, an RNA disclosed herein comprises a hAg 5′ UTR or a fragment thereof.

[0588] In some embodiments, an RNA disclosed herein comprises a 5′ UTR having at least 80%, at least 85%, at least 90%, at least 95%, at least 96%, at least 97%, at least 98%, or at least 99% identity to a 5′ UTR with the sequence according to SEQ ID NO: 472. In some embodiments, an RNA disclosed herein comprises a 5′ UTR provided in SEQ ID NO: 472.

### 5. PolyA Tail

[0589] In some embodiments, a polynucleotide (e.g., DNA, RNA) disclosed herein comprises a polyadenylate (polyA) sequence, e.g., as described herein. In some embodiments, a polyA sequence is situated downstream of a 3′-UTR, e.g., adjacent to a 3′-UTR.

[0590] As used herein, the term “poly(A) sequence” or “poly-A tail” refers to an uninterrupted or interrupted sequence of adenylate residues which is typically located at the 3′-end of an RNA polynucleotide. Poly(A) sequences are known to those of skill in the art and may follow the 3′-UTR in the RNAs described herein. An uninterrupted poly(A) sequence is characterized by consecutive adenylate residues. In nature, an uninterrupted poly(A) sequence is typical. In some embodiments, polynucleotides disclosed herein comprise an uninterrupted Poly(A) sequence. In some embodiments, polynucleotides disclosed herein comprise interrupted Poly(A) sequence. In some embodiments, RNAs disclosed herein can have a poly(A) sequence attached to the free 3′-end of the RNA by a template-independent RNA polymerase after transcription or a poly(A) sequence encoded by DNA and transcribed by a template-dependent RNA polymerase.

[0591] It has been demonstrated that a poly(A) sequence of about 120 A nucleotides has a beneficial influence on the levels of RNA in transfected eukaryotic cells, as well as on the levels of protein that is translated from an open reading frame that is present upstream (5′) of the poly(A) sequence (Holtkamp et al., 2006, Blood, vol. 108, pp. 4009-4017, which is herein incorporated by reference).

[0592] In some embodiments, a poly(A) sequence in accordance with the present disclosure is not limited to a particular length; in some embodiments, a poly(A) sequence is any length. In some embodiments, a poly(A) sequence comprises, essentially consists of, or consists of at least 20, at least 30, at least 40, at least 80, or at least 100 and up to 500, up to 400, up to 300, up to 200, or up to 150 A nucleotides, and, in particular, about 120 A nucleotides. In this context, “essentially consists of” means that most nucleotides in the poly(A) sequence, typically at least 75%, at least 80%, at least 85%, at least 90%, at least 95%, at least 96%, at least 97%, at least 98%, or at least 99% by number of nucleotides in the poly(A) sequence are A nucleotides, but permits that remaining nucleotides are nucleotides other than A nucleotides, such as U nucleotides (uridylate), G nucleotides (guanylate), or C nucleotides (cytidylate). In this context, “consists of” means that all nucleotides in the poly(A) sequence, i.e., 100% by number of nucleotides in the poly(A) sequence, are A nucleotides. The term “A nucleotide” or “A” refers to adenylate.

[0593] In some embodiments, a poly(A) sequence is attached during RNA transcription, e.g., during preparation of in vitro transcribed RNA, based on a DNA template comprising repeated dT nucleotides (deoxythymidylate) in the strand complementary to the coding strand. The DNA sequence encoding a poly(A) sequence (coding strand) is referred to as poly(A) cassette.

[0594] In some embodiments, the poly(A) cassette present in the coding strand of DNA essentially consists of dA nucleotides, but is interrupted by a random sequence of the four nucleotides (dA, dC, dG, and dT). Such random sequence may be 5 to 50, 10 to 30, or 10 to 20 nucleotides in length. Such a cassette is disclosed in WO 2016/005324 A1, hereby incorporated by reference. Any poly(A) cassette disclosed in WO 2016/005324 A1 may be used in accordance with the present disclosure. A poly(A) cassette that essentially consists of dA nucleotides, but is interrupted by a random sequence having an equal distribution of the four nucleotides (dA, dC, dG, dT) and having a length of e.g., 5 to 50 nucleotides shows, on DNA level, constant propagation of plasmid DNA in E. coli and is still associated, on RNA level, with the beneficial properties with respect to supporting RNA stability and translational efficiency is encompassed. In some embodiments, the poly(A) sequence contained in an RNA polynucleotide described herein essentially consists of A nucleotides, but is interrupted by a random sequence of the four nucleotides (A, C, G, U). Such random sequence may be 5 to 50, 10 to 30, or 10 to 20 nucleotides in length.

[0595] In some embodiments, no nucleotides other than A nucleotides flank a poly(A) sequence at its 3′-end, i.e., the poly(A) sequence is not masked or followed at its 3′-end by a nucleotide other than A.

[0596] In some embodiments, the poly(A) sequence may comprise at least 20, at least 30, at least 40, at least 80, or at least 100 and up to 500, up to 400, up to 300, up to 200, or up to 150 nucleotides. In some embodiments, the poly(A) sequence may essentially consist of at least 20, at least 30, at least 40, at least 80, or at least 100 and up to 500, up to 400, up to 300, up to 200, or up to 150 nucleotides. In some embodiments, the poly(A) sequence may consist of at least 20, at least 30, at least 40, at least 80, or at least 100 and up to 500, up to 400, up to 300, up to 200, or up to 150 nucleotides. In some embodiments, the poly(A) sequence comprises at least 100 nucleotides. In some embodiments, the poly(A) sequence comprises about 150 nucleotides. In some embodiments, the poly(A) sequence comprises about 120 nucleotides.

[0597] In some embodiments, a poly A tail comprises a specific number of Adenosines, such as about 50 or more, about 60 or more, about 70 or more, about 80 or more, about 90 or more, about 100 or more, about 120, or about 150 or about 200. In some embodiments a poly A tail of a string construct may comprise 200 A residues or less. In some embodiments, a poly A tail of a string construct may comprise about 200 A residues. In some embodiments, a poly A tail of a string construct may comprise 180 A residues or less. In some embodiments, a poly A tail of a string construct may comprise about 180 A residues. In some embodiments, a poly A tail may comprise 150 residues or less.

[0598] In some embodiments, RNA comprises a poly(A) sequence comprising the nucleotide sequence of SEQ ID NO: 474, or a nucleotide sequence having at least 99%, 98%, 97%, 96%, 95%, 90%, 85%, or 80% identity to the nucleotide sequence of SEQ ID NO: 474. In some embodiments, a poly(A) tail comprises a nucleotide sequence according to SEQ ID NO: 474. In some embodiments, a poly(A) tail comprises a plurality of A residues interrupted by a linker. In some embodiments, a linker comprises the nucleotide sequence GCATATGAC. (SEQ ID NO: 475).

### 6. 3′ UTR

[0599] In some embodiments, an RNA utilized in accordance with the present disclosure comprises a 3′-UTR. As used herein, the terms “three prime untranslated region,” “3′ untranslated region,” or “3′ UTR” refer to a sequence of an mRNA molecule that begins following a stop codon of a coding region of an open reading frame sequence. In some embodiments, the 3′ UTR begins immediately after a stop codon of a coding region of an open reading frame sequence, e.g., in its natural context. In other embodiments, the 3′ UTR does not begin immediately after stop codon of the coding region of an open reading frame sequence, e.g., in its natural context. The term “3′-UTR” does preferably not include the poly(A) sequence. Thus, the 3′-UTR is upstream of the poly(A) sequence (if present), e.g. directly adjacent to the poly(A) sequence.

[0600] In some embodiments, an RNA disclosed herein comprises a 3′ UTR comprising an F element and/or an I element. In some embodiments, a 3′ UTR or a proximal sequence thereto comprises a restriction site. In some embodiments, a restriction site is a BamHI site. In some embodiments, a restriction site is a Xhol site.

[0601] In some embodiments, an RNA construct comprises an F element. In some embodiments, a F element sequence is a 3′-UTR of amino-terminal enhancer of split (AES).

[0602] In some embodiments, an RNA disclosed herein comprises a 3′ UTR having at least 80%, at least 85%, at least 90%, at least 95%, at least 96%, at least 97%, at least 98%, or at least 99% identity to a 3′ UTR with the sequence according to SEQ ID NO: 473. In some embodiments, an RNA disclosed herein comprises a 3′ UTR provided in SEQ ID NO: 473.

[0603] In some embodiments, a 3′UTR is an FI element as described in WO2017/060314, which is herein incorporated by reference in its entirety.

### 7. Exemplary Polyribonucleotides

[0604] Exemplary polyribonucleotide constructs comprising coding and non-coding elements as described herein are shown in Table 6 below.

TABLE 6
Exemplary polyribonucleotide constructs
RNA Construct Sequences

| SEQ ID NO: | |
|---|---|
| | IgG - Heavy Chain |
| 454 | 5′UTR-husec2_VH(1-18)_CH1(G1m3)_Hinge_CH2_CH3(G1m3/17)-3′UTR-PolyA |
| 455 | 5′UTR-husec2_VH(1-18)_CH1(G1m3)_Hinge_CH2_CH3(LS)(G1m3/17)-3′UTR-PolyA |
| 456 | 5′UTR-husec2_VH(1-18)_CH1(G1m3)_Hinge_CH2_CH3(cak)(LS)(G1m3/17)-3′UTR-PolyA |
| 457 | 5′UTR-husec2_VH(1-18)_CH1(G1m3)_Hinge_CH2(GAALIE)_CH3(LS)(G1m3/17)-3′UTR-PolyA |
| 669 | 5′UTR-husec2_VH(1-18)_CH1(G1m3)_Hinge_CH2(GAIE)_CH3(LS)(G1m3/17)-3′UTR-PolyA |
| 670 | 5′UTR-husec2_VH(1-18)_CH1(G1m17)_Hinge_CH2_CH3(G1m3/17)-3′UTR-PolyA |
| 671 | 5′UTR-husec2_VH(1-18)_CH1(G1m17)_Hinge_CH2_CH3(LS)(G1m3/17)-3′UTR-PolyA |
| 672 | 5′UTR-husec2_VH(1-18)_CH1(G1m17)_Hinge_CH2_CH3(cak)(LS)(G1m3/17)-3′UTR-PolyA |
| 673 | 5′UTR-husec2_VH(1-18)_CH1(G1m17)_Hinge_CH2(GAALIE)_CH3(LS)(G1m3/17)-3′UTR-PolyA |
| 674 | 5′UTR-husec2_VH(1-18)_CH1(G1m17)_Hinge_CH2(GAIE)_CH3(LS)(G1m3/17)-3′UTR-PolyA |
| 675 | 5′UTR-husec2_VH(1-18)_CH1(G1m17)_Hinge_CH2_CH3(G1m17,1)-3′UTR-PolyA |
| 676 | 5′UTR-husec2_VH(1-18)_CH1(G1m17)_Hinge_CH2_CH3(LS)(G1m17,1)-3′UTR-PolyA |
| 677 | 5′UTR-husec2_VH(1-18)_CH1(G1m17)_Hinge_CH2_CH3(cak)(LS)(G1m17,1)-3′UTR-PolyA |
| 678 | 5′UTR-husec2_VH(1-18)_CH1(G1m17)_Hinge_CH2(GAALIE)_CH3(LS)(G1m17,1)-3′UTR-PolyA |
| 679 | 5′UTR-husec2_VH(1-18)_CH1(G1m17)_Hinge_CH2(GAIE)_CH3(LS)(G1m17,1)-3′UTR-PolyA |
| 680 | 5′UTR-husec2_VH(1-18)_CH1(G1m3)_Hinge_CH2_CH3(cah)(LS)(G1m3/17)-3′UTR-PolyA |
| 681 | 5′UTR-husec2_VH(1-18)_CH1(G1m3)_Hinge_CH2(GA)_CH3(LS)(G1m3/17)-3′UTR-PolyA |
| 682 | 5′UTR-husec2_VH(1-18)_CH1(G1m3)_Hinge_CH2(IE)_CH3(LS)(G1m3/17)-3′UTR-PolyA |
| 683 | 5′UTR-husec2_VH(1-18)_CH1(G1m3)_Hinge_CH2(GAALIE)_CH3(cah)(LS)(G1m3/17)-3′UTR-PolyA |
| 684 | 5′UTR-husec2_VH(1-18)_CH1(G1m3)_Hinge_CH2(GAIE)_CH3(cah)(LS)(G1m3/17)-3′UTR-PolyA |
| 685 | 5′UTR-husec2_VH(1-18)_CH1(G1m3)_Hinge_CH2(GAALIE)_CH3(cak)(LS)(G1m3/17)-3′UTR-PolyA |
| 686 | 5′UTR-husec2_VH(1-18)_CH1(G1m3)_Hinge_CH2(GAIE)_CH3(cak)(LS)(G1m3/17)-3′UTR-PolyA |
| 687 | 5′UTR-husec2_VH(1-18)_CH1(G1m17)_Hinge_CH2_CH3(cah)(LS)(G1m3/17)-3′UTR-PolyA |
| 688 | 5′UTR-husec2_VH(1-18)_CH1(G1m17)_Hinge_CH2(GA)_CH3(LS)(G1m3/17)-3′UTR-PolyA |
| 689 | 5′UTR-husec2_VH(1-18)_CH1(G1m17)_Hinge_CH2(IE)_CH3(LS)(G1m3/17)-3′UTR-PolyA |
| 690 | 5′UTR-husec2_VH(1-18)_CH1(G1m17)_Hinge_CH2(GAALIE)_CH3(cah)(LS)(G1m3/17)-3′UTR-PolyA |
| 691 | 5′UTR-husec2_VH(1-18)_CH1(G1m17)_Hinge_CH2(GAIE)_CH3(cah)(LS)(G1m3/17)-3′UTR-PolyA |
| 692 | 5′UTR-husec2_VH(1-18)_CH1(G1m17)_Hinge_CH2(GAALIE)_CH3(cak)(LS)(G1m3/17)-3′UTR-PolyA |
| 693 | 5′UTR-husec2_VH(1-18)_CH1(G1m17)_Hinge_CH2(GAIE)_CH3(cak)(LS)(G1m3/17)-3′UTR-PolyA |
| 694 | 5′UTR-husec2_VH(1-18)_CH1(G1m17)_Hinge_CH2_CH3(cah)(LS)(G1m17,1)-3′UTR-PolyA |
| 695 | 5′UTR-husec2_VH(1-18)_CH1(G1m17)_Hinge_CH2(GA)_CH3(LS)(G1m17,1)-3′UTR-PolyA |
| 696 | 5′UTR-husec2_VH(1-18)_CH1(G1m17)_Hinge_CH2(IE)_CH3(LS)(G1m17,1)-3′UTR-PolyA |
| 697 | 5′UTR-husec2_VH(1-18)_CH1(G1m17)_Hinge_CH2(GAALIE)_CH3(cah)(LS)(G1m17,1)-3′UTR-PolyA |
| 698 | 5′UTR-husec2_VH(1-18)_CH1(G1m17)_Hinge_CH2(GAIE)_CH3(cah)(LS)(G1m17,1)-3′UTR-PolyA |
| 699 | 5′UTR-husec2_VH(1-18)_CH1(G1m17)_Hinge_CH2(GAALIE)_CH3(cak)(LS)(G1m17,1)-3′UTR-PolyA |
| | IgG - Light Chain |
| 458 | 5′UTR-husec2_VL(1-18)_Ck_3′UTR-PolyA |
| | CrossMabCH1-CLx Heavy Chain |
| 459 | 5′UTR-husec2_VH(1-18)_Ck(ASE_Hinge(delEPKSC)_CH2_CH3(LS)(G1m3/17)-3′UTR-PolyA |
| 700 | 5′UTR-husec2_VH(1-18)_Ck(ASQ)_Hinge(delEPKSC)_CH2_CH3(G1m3/17)-3′UTR-PolyA |
| 701 | 5′UTR-husec2_VH(1-18)_Ck(ASQ)_Hinge(delEPKSC)_CH2_CH3(G1m3/17)-3′UTR-PolyA |
| 702 | 5′UTR-husec2_VH(1-18)_Ck(ASQ)_Hinge(delEPKSC)_CH2_CH3(LS)(G1m3/17)-3′UTR-PolyA |
| 703 | 5′UTR-husec2_VH(1-18)_Ck(ASQ)_Hinge(delEPKSC)_CH2_CH3(G1m17,1)-3′UTR-PolyA |
| 704 | 5′UTR-husec2_VH(1-18)_Ck(ASQ)_Hinge(delEPKSC)_CH2_CH3(LS)(G1m17,1)-3′UTR-PolyA |
| 705 | 5′UTR-husec2_VH(1-18)_Ck(ASQ)_Hinge(delEPKSC)_CH2_CH3(cah)(LS)(G1m3/17)-3′UTR-PolyA |
| 706 | 5′UTR-husec2_VH(1-18)_Ck(ASQ)_Hinge(delEPKSC)_CH2(GAALIE)_CH3(cah)(LS)(G1m3/17)-3′UTR- |
| | PolyA |
| 707 | 5′UTR-husec2_VH(1-18)_Ck(ASQ)_Hinge(delEPKSC)_CH2(GAIE)_CH3(cah)(LS)(G1m3/17)-3′UTR- |
| | PolyA |
| 708 | 5′UTR-husec2_VH(1-18)_Ck(ASQ)_Hinge(delEPKSC)_CH2_CH3(cak)(LS)(G1m3/17)-3′UTR-PolyA |
| 709 | 5′UTR-husec2_VH(1-18)_Ck(ASQ)_Hinge(delEPKSC)_CH2(GAALIE)_CH3(cak)(LS)(G1m3/17)-3′UTR- |
| | PolyA |
| 710 | 5′UTR-husec2_VH(1-18)_Ck(ASQ)_Hinge(delEPKSC)_CH2(GAIE)_CH3(cak)(LS)(G1m3/17)-3′UTR- |
| | PolyA |
| 711 | 5′UTR-husec2_VH(1-18)_Ck(ASQ)_Hinge(delEPKSC)_CH2_CH3(cah)(LS)(G1m3/17)-3′UTR-PolyA |
| 712 | 5′UTR-husec2_VH(1-18)_Ck(ASQ)_Hinge(delEPKSC)_CH2(GAALIE)_CH3(cah)(LS)(G1m3/17)-3′UTR- |
| | PolyA |
| 713 | 5′UTR-husec2_VH(1-18)_Ck(ASQ)_Hinge(delEPKSC)_CH2(GAIE)_CH3(cah)(LS)(G1m3/17)-3′UTR- |
| | PolyA |
| 714 | 5′UTR-husec2_VH(1-18)_Ck(ASQ)_Hinge(delEPKSC)_CH2_CH3(cak)(LS)(G1m3/17)-3′UTR-PolyA |
| 715 | 5′UTR-husec2_VH(1-18)_Ck(ASQ)_Hinge(delEPKSC)_CH2(GAALIE)_CH3(cak)(LS)(G1m3/17)-3′UTR- |
| | PolyA |
| 716 | 5′UTR-husec2_VH(1-18)_Ck(ASQ)_Hinge(delEPKSC)_CH2(GAIE)_CH3(cak)(LS)(G1m3/17)-3′UTR- |
| | PolyA |
| 717 | 5′UTR-husec2_VH(1-18)_Ck(ASQ)_Hinge(delEPKSC)_CH2_CH3(cah)(LS)(G1m17,1)-3′UTR-PolyA |
| 718 | 5′UTR-husec2_VH(1-18)_Ck(ASQ)_Hinge(delEPKSC)_CH2(GAALIE)_CH3(cah)(LS)(G1m17,1)-3′UTR- |
| | PolyA |
| 719 | 5′UTR-husec2_VH(1-18)_Ck(ASQ)_Hinge(delEPKSC)_CH2(GAIE)_CH3(cah)(LS)(G1m17,1)-3′UTR- |
| | PolyA |
| 720 | 5′UTR-husec2_VH(1-18)_Ck(ASQ)_Hinge(delEPKSC)_CH2_CH3(cak)(LS)(G1m17,1)-3′UTR-PolyA |
| 721 | 5′UTR-husec2_VH(1-18)_Ck(ASQ)_Hinge(delEPKSC)_CH2(GAALIE)_CH3(cak)(LS)(G1m17,1)-3′UTR- |
| | PolyA |
| 722 | 5′UTR-husec2_VH(1-18)_Ck(ASQ)_Hinge(delEPKSC)_CH2(GAIE)_CH3(cak)(LS)(G1m17,1)-3′UTR- |
| | PolyA |
| | CrossMabCH1-CLx Light Chain |
| 460 | 5′UTR-husec2_VL(1-18)_CH1(SS)(G1m3)_3′UTR-PolyA |
| 723 | 5′UTR-husec2_VL(1-18)_CH1(SS)(G1m17)_3′UTR-PolyA |
| | CvCrossMabCH1-CLcv - Heavy Chain |
| 461 | 5′UTR-husec2_VH(1-18)_CH1(ED)(G1m3)_Hinge_CH2_CH3(LS)(G1m3/17)-3′UTR-PolyA |
| 462 | 5′UTR-husec2_VH(1-18)_CH1(ED)(G1m3)_Hinge_CH2(GAALIE)_CH3(LS)(G1m3/17)-3′UTR-PolyA |
| 463 | 5′UTR-husec2_VH(1-18)_CH1(ED)(G1m3)_Hinge_CH2_CH3(cah)(LS)(G1m3/17)-3′UTR-PolyA |
| 464 | 5′UTR-husec2_VH(1-18)_CH1(ED)(G1m3)_Hinge_CH2(GAALIE)_CH3(cah)(LS)(G1m3/17)-3′UTR- |
| | PolyA |
| 465 | 5′UTR-husec2_VH(1-18)_CH1(ED)(G1m3)_Hinge_CH2_CH3(cak)(LS)(G1m3/17)-3′UTR-PolyA |
| 466 | 5′UTR-husec2_VH(1-18)_CH1(ED)(G1m3)_Hinge_CH2(GAALIE)_CH3(cak)(LS)(G1m3/17)-3′UTR- |
| | PolyA |
| 724 | 5′UTR-husec2_VH(1-18)_CH1(ED)(G1m3)_Hinge_CH2_CH3(G1m3/17)-3′UTR-PolyA |
| 725 | 5′UTR-husec2_VH(1-18)_CH1(ED)(G1m3)_Hinge_CH2(GAIE)_CH3(LS)(G1m3/17)-3′UTR-PolyA |
| 726 | 5′UTR-husec2_VH(1-18)_CH1(ED)(G1m17)_Hinge_CH2_CH3(G1m3/17)-3′UTR-PolyA |
| 727 | 5′UTR-husec2_VH(1-18)_CH1(ED)(G1m17)_Hinge_CH2_CH3(LS)(G1m3/17)-3′UTR-PolyA |
| 728 | 5′UTR-husec2_VH(1-18)_CH1(ED)(G1m17)_Hinge_CH2(GAALIE)_CH3(LS)(G1m3/17)-3′UTR-PolyA |
| 729 | 5′UTR-husec2_VH(1-18)_CH1(ED)(G1m17)_Hinge_CH2(GAIE)_CH3(LS)(G1m3/17)-3′UTR-PolyA |
| 730 | 5′UTR-husec2_VH(1-18)_CH1(ED)(G1m17)_Hinge_CH2_CH3(G1m17,1)-3′UTR-PolyA |
| 731 | 5′UTR-husec2_VH(1-18)_CH1(ED)(G1m17)_Hinge_CH2_CH3(LS)(G1m17,1)-3′UTR-PolyA |
| 732 | 5′UTR-husec2_VH(1-18)_CH1(ED)(G1m17)_Hinge_CH2(GAALIE)_CH3(LS)(G1m17,1)-3′UTR-PolyA |
| 733 | 5′UTR-husec2_VH(1-18)_CH1(ED)(G1m17)_Hinge_CH2(GAIE)_CH3(LS)(G1m17,1)-3′UTR-PolyA |
| 734 | 5′UTR-husec2_VH(1-18)_CH1(ED)(G1m3)_Hinge_CH2(GAIE)_CH3(cah)(LS)(G1m3/17)-3′UTR-PolyA |
| 735 | 5′UTR-husec2_VH(1-18)_CH1(ED)(G1m3)_Hinge_CH2(GAIE)_CH3(cak)(LS)(G1m3/17)-3′UTR-PolyA |
| 736 | 5′UTR-husec2_VH(1-18)_CH1(ED)(G1m17)_Hinge_CH2_CH3(cah)(LS)(G1m3/17)-3′UTR-PolyA |
| 737 | 5′UTR-husec2_VH(1-18)_CH1(ED)(G1m17)_Hinge_CH2(GAALIE)_CH3(cah)(LS)(G1m3/17)-3′UTR- |
| | PolyA |
| 738 | 5′UTR-husec2_VH(1-18)_CH1(ED)(G1m17)_Hinge_CH2(GAIE)_CH3(cah)(LS)(G1m3/17)-3′UTR-PolyA |
| 739 | 5′UTR-husec2_VH(1-18)_CH1(ED)(G1m17)_Hinge_CH2_CH3(cak)(LS)(G1m3/17)-3′UTR-PolyA |
| 740 | 5′UTR-husec2_VH(1-18)_CH1(ED)(G1m17)_Hinge_CH2(GAALIE)_CH3(cak)(LS)(G1m3/17)-3′UTR- |
| | PolyA |
| 741 | 5′UTR-husec2_VH(1-18)_CH1(ED)(G1m17)_Hinge_CH2(GAIE)_CH3(cak)(LS)(G1m3/17)-3′UTR-PolyA |
| 742 | 5′UTR-husec2_VH(1-18)_CH1(ED)(G1m17)_Hinge_CH2_CH3(cah)(LS)(G1m17,1)-3′UTR-PolyA |
| 743 | 5′UTR-husec2_VH(1-18)_CH1(ED)(G1m17)_Hinge_CH2(GAALIE)_CH3(cah)(LS)(G1m17,1)-3′UTR- |
| | PolyA |
| 744 | 5′UTR-husec2_VH(1-18)_CH1(ED)(G1m17)_Hinge_CH2(GAIE)_CH3(cah)(LS)(G1m17,1)-3′UTR-PolyA |
| 745 | 5′UTR-husec2_VH(1-18)_CH1(ED)(G1m17)_Hinge_CH2_CH3(cak)(LS)(G1m17,1)-3′UTR-PolyA |
| 746 | 5′UTR-husec2_VH(1-18)_CH1(ED)(G1m17)_Hinge_CH2(GAALIE)_CH3(cak)(LS)(G1m17,1)-3′UTR- |
| | PolyA |
| 747 | 5′UTR-husec2_VH(1-18)_CH1(ED)(G1m17)_Hinge_CH2(GAIE)_CH3(cak)(LS)(G1m17,1)-3′UTR-PolyA |
| | CvCrossMabCH1-CLcv - Light Chain |
| 467 | 5′UTR-husec2_VL(1-18)_Ck(KR)_3′UTR-PolyA |
| 748 | 5′UTR-husec2_VL(1-18)_Ck(RK)_3′UTR-PolyA |
| | scFv-Fc variants |
| 468 | 5′UTR-husec2_VH(1-18)_LL4_VL(1-18)_LL4_Hinge(C/S)_CH2_CH3(LS)(G1m3/17)-3′UTR-PolyA |
| 469 | 5′UTR-husec2_VL(1-18)_LL4_VH(1-18)_LL4_Hinge(C/S)_CH2_CH3(LS)(G1m3/17)-3′UTR-PolyA |
| 470 | 5′UTR-husec2_VH(1-18)_LL5_VL(1-18)_LL4 Hinge(C/S)_CH2_CH3(LS)(G1m3/17)-3′UTR-PolyA |
| 471 | 5′UTR-husec2_VL(1-18)_LL5_VH(1-18)_LL4_Hinge(C/S)_CH2_CH3(LS)(G1m3/17)-3′UTR-PolyA |
| 749 | 5′UTR-husec2_VH(1-18)_LL4_VL(1-18)_LL4_Hinge(C/S)_CH2_CH3(G1m3/17)-3′UTR-PolyA |
| 750 | 5′UTR-husec2_VH(1-18)_LL4_VL(1-18)_LL4_Hinge(C/S)_CH2(GAALIE)_CH3(LS)(G1m3/17)-3′UTR- |
| | PolyA |
| 751 | 5′UTR-husec2_VH(1-18)_LL4_VL(1-18)_LL4_Hinge(C/S)_CH2(GAIE)_CH3(LS)(G1m3/17)-3′UTR- |
| | PolyA |
| 752 | 5′UTR-husec2_VH(1-18)_LL4_VL(1-18)_LL4_Hinge(C/S)_CH2_CH3(G1m3/17)-3′UTR-PolyA |
| 753 | 5′UTR-husec2_VH(1-18)_LL4_VL(1-18)_LL4_Hinge(C/S)_CH2_CH3(LS)(G1m3/17)-3′UTR-PolyA |
| 754 | 5′UTR-husec2_VH(1-18)_LL4_VL(1-18)_LL4_Hinge(C/S)_CH2(GAALIE)_CH3(LS)(G1m3/17)-3′UTR- |
| | PolyA |
| 755 | 5′UTR-husec2_VH(1-18)_LL4_VL(1-18)_LL4_Hinge(C/S)_CH2(GAIE)_CH3(LS)(G1m3/17)-3′UTR- |
| | PolyA |
| 756 | 5′UTR-husec2_VH(1-18)_LL4_VL(1-18)_LL4_Hinge(C/S)_CH2_CH3(G1m17,1)-3′UTR-PolyA |
| 757 | 5′UTR-husec2_VH(1-18)_LL4_VL(1-18)_LL4_Hinge(C/S)_CH2_CH3(LS)(G1m17,1)-3′UTR-PolyA |
| 758 | 5′UTR-husec2_VH(1-18)_LL4_VL(1-18)_LL4_Hinge(C/S)_CH2(GAALIE)_CH3(LS)(G1m17,1)-3′UTR- |
| | PolyA |
| 759 | 5′UTR-husec2_VH(1-18)_LL4_VL(1-18)_LL4_Hinge(C/S)_CH2(GAIE)_CH3(LS)(G1m17,1)-3′UTR- |
| | PolyA |
| 760 | 5′UTR-husec2_VL(1-18)_LL4_VH(1-18)_LL4_Hinge(C/S)_CH2_CH3(G1m3/17)-3′UTR-PolyA |
| 761 | 5′UTR-husec2_VL(1-18)_LL4_VH(1-18)_LL4_Hinge(C/S)_CH2(GAALIE)_CH3(LS)(G1m3/17)-3′UTR- |
| | PolyA |
| 762 | 5′UTR-husec2_VL(1-18)_LL4_VH(1-18)_LL4_Hinge(C/S)_CH2(GAIE)_CH3(LS)(G1m3/17)-3′UTR- |
| | PolyA |
| 763 | 5′UTR-husec2_VL(1-18)_LL4_VH(1-18)_LL4_Hinge(C/S)_CH2_CH3(G1m3/17)-3′UTR-PolyA |
| 764 | 5′UTR-husec2_VL(1-18)_LL4_VH(1-18)_LL4_Hinge(C/S)_CH2_CH3(LS)(G1m3/17)-3′UTR-PolyA |
| 765 | 5′UTR-husec2_VL(1-18)_LL4_VH(1-18)_LL4_Hinge(C/S)_CH2(GAALIE)_CH3(LS)(G1m3/17)-3′UTR- |
| | PolyA |
| 766 | 5′UTR-husec2_VL(1-18)_LL4_VH(1-18)_LL4_Hinge(C/S)_CH2(GAIE)_CH3(LS)(G1m3/17)-3′UTR- |
| | PolyA |
| 767 | 5′UTR-husec2_VL(1-18)_LL4_VH(1-18)_LL4_Hinge(C/S)_CH2_CH3(G1m17,1)-3′UTR-PolyA |
| 768 | 5′UTR-husec2_VL(1-18)_LL4_VH(1-18)_LL4_Hinge(C/S)_CH2_CH3(LS)(G1m17,1)-3′UTR-PolyA |
| 769 | 5′UTR-husec2_VL(1-18)_LL4_VH(1-18)_LL4_Hinge(C/S)_CH2(GAALIE)_CH3(LS)(G1m17,1)-3′UTR- |
| | PolyA |
| 770 | 5′UTR-husec2_VL(1-18)_LL4_VH(1-18)_LL4_Hinge(C/S)_CH2(GAIE)_CH3(LS)(G1m17,1)-3′UTR- |
| | PolyA |
| 771 | 5′UTR-husec2_VH(1-18)_LL5_VL(1-18)_LL4_Hinge(C/S)_CH2_CH3(G1m3/17)-3′UTR-PolyA |
| 772 | 5′UTR-husec2_VH(1-18)_LL5_VL(1-18)_LL4_Hinge(C/S)_CH2(GAALIE)_CH3(LS)(G1m3/17)-3′UTR- |
| | PolyA |
| 773 | 5′UTR-husec2_VH(1-18)_LL5_VL(1-18)_LL4_Hinge(C/S)_CH2(GAIE)_CH3(LS)(G1m3/17)-3′UTR- |
| | PolyA |
| 774 | 5′UTR-husec2_VH(1-18)_LL5_VL(1-18)_LL4_Hinge(C/S)_CH2_CH3(G1m3/17)-3′UTR-PolyA |
| 775 | 5′UTR-husec2_VH(1-18)_LL5_VL(1-18)_LL4_Hinge(C/S)_CH2_CH3(LS)(G1m3/17)-3′UTR-PolyA |
| 776 | 5′UTR-husec2_VH(1-18)_LL5_VL(1-18)_LL4_Hinge(C/S)_CH2(GAALIE)_CH3(LS)(G1m3/17)-3′UTR- |
| | PolyA |
| 777 | 5′UTR-husec2_VH(1-18)_LL5_VL(1-18)_LL4_Hinge(C/S)_CH2(GAIE)_CH3(LS)(G1m3/17)-3′UTR- |
| | PolyA |
| 778 | 5′UTR-husec2_VH(1-18)_LL5_VL(1-18)_LL4_Hinge(C/S)_CH2_CH3(G1m17,1)-3′UTR-PolyA |
| 779 | 5′UTR-husec2_VH(1-18)_LL5_VL(1-18)_LL4_Hinge(C/S)_CH2_CH3(LS)(G1m17,1)-3′UTR-PolyA |
| 780 | 5′UTR-husec2_VH(1-18)_LL5_VL(1-18)_LL4_Hinge(C/S)_CH2(GAALIE)_CH3(LS)(G1m17,1)-3′UTR- |
| | PolyA |
| 781 | 5′UTR-husec2_VH(1-18)_LL5_VL(1-18)_LL4_Hinge(C/S)_CH2(GAIE)_CH3(LS)(G1m17,1)-3′UTR- |
| | PolyA |
| 782 | 5′UTR-husec2_VL(1-18)_LL5_VH(1-18)_LL4_Hinge(C/S)_CH2_CH3(G1m3/17)-3′UTR-PolyA |
| 783 | 5′UTR-husec2_VL(1-18)_LL5_VH(1-18)_LL4_Hinge(C/S)_CH2(GAALIE)_CH3(LS)(G1m3/17)-3′UTR- |
| | PolyA |
| 784 | 5′UTR-husec2_VL(1-18)_LL5_VH(1-18)_LL4_Hinge(C/S)_CH2(GAIE)_CH3(LS)(G1m3/17)-3′UTR- |
| | PolyA |
| 785 | 5′UTR-husec2_VL(1-18)_LL5_VH(1-18)_LL4_Hinge(C/S)_CH2_CH3(G1m3/17)-3′UTR-PolyA |
| 786 | 5′UTR-husec2_VL(1-18)_LL5_VH(1-18)_LL4_Hinge(C/S)_CH2_CH3(LS)(G1m3/17)-3′UTR-PolyA |
| 787 | 5′UTR-husec2_VL(1-18)_LL5_VH(1-18)_LL4_Hinge(C/S)_CH2(GAALIE)_CH3(LS)(G1m3/17)-3′UTR- |
| | PolyA |
| 788 | 5′UTR-husec2_VL(1-18)_LL5_VH(1-18)_LL4_Hinge(C/S)_CH2(GAIE)_CH3(LS)(G1m3/17)-3′UTR- |
| | PolyA |
| 789 | 5′UTR-husec2_VL(1-18)_LL5_VH(1-18)_LL4_Hinge(C/S)_CH2_CH3(G1m17,1)-3′UTR-PolyA |
| 790 | 5′UTR-husec2_VL(1-18)_LL5_VH(1-18)_LL4_Hinge(C/S)_CH2_CH3(LS)(G1m17,1)-3′UTR-PolyA |
| 791 | 5′UTR-husec2_VL(1-18)_LL5_VH(1-18)_LL4_Hinge(C/S)_CH2(GAALIE)_CH3(LS)(G1m17,1)-3′UTR- |
| | PolyA |
| 792 | 5′UTR-husec2_VL(1-18)_LL5_VH(1-18)_LL4_Hinge(C/S)_CH2(GAIE)_CH3(LS)(G1m17,1)-3′UTR- |
| | PolyA |
| 793 | 5′UTR-husec2_VH(1-18)_LL4_VL(1-18)_LL4_Hinge(C/S)_CH2_CH3(cah)(LS)(G1m3/17)-3′UTR-PolyA |
| 794 | 5′UTR-husec2_VH(1-18)_LL4_VL(1-18)_LL4_Hinge(C/S)_CH2(GAALIE)_CH3(cah)(LS)(G1m3/17)- |
| | 3′UTR-PolyA |
| 795 | 5′UTR-husec2_VH(1-18)_LL4_VL(1-18)_LL4_Hinge(C/S)_CH2(GAIE)_CH3(cah)(LS)(G1m3/17)- |
| | 3′UTR-PolyA |
| 796 | 5′UTR-husec2_VH(1-18)_LL4_VL(1-18)_LL4_Hinge(C/S)_CH2_CH3(cak)(LS)(G1m3/17)-3′UTR-PolyA |
| 797 | 5′UTR-husec2_VH(1-18)_LL4_VL(1-18)_LL4_Hinge(C/S)_CH2(GAALIE)_CH3(cak)(LS)(G1m3/17)- |
| | 3′UTR-PolyA |
| 798 | 5′UTR-husec2_VH(1-18)_LL4_VL(1-18)_LL4_Hinge(C/S)_CH2(GAIE)_CH3(cak)(LS)(G1m3/17)- |
| | 3′UTR-PolyA |
| 799 | 5′UTR-husec2_VH(1-18)_LL4_VL(1-18)_LL4_Hinge(C/S)_CH2_CH3(cah)(LS)(G1m3/17)-3′UTR-PolyA |
| 800 | 5′UTR-husec2_VH(1-18)_LL4_VL(1-18)_LL4_Hinge(C/S)_CH2(GAALIE)_CH3(cah)(LS)(G1m3/17)- |
| | 3′UTR-PolyA |
| 801 | 5′UTR-husec2_VH(1-18)_LL4_VL(1-18)_LL4_Hinge(C/S)_CH2(GAIE)_CH3(cah)(LS)(G1m3/17)- |
| | 3′UTR-PolyA |
| 802 | 5′UTR-husec2_VH(1-18)_LL4_VL(1-18)_LL4_Hinge(C/S)_CH2_CH3(cak)(LS)(G1m3/17)-3′UTR-PolyA |
| 803 | 5′UTR-husec2_VH(1-18)_LL4_VL(1-18)_LL4_Hinge(C/S)_CH2(GAALIE)_CH3(cak)(LS)(G1m3/17)- |
| | 3′UTR-PolyA |
| 804 | 5′UTR-husec2_VH(1-18)_LL4_VL(1-18)_LL4_Hinge(C/S)_CH2(GAIE)_CH3(cak)(LS)(G1m3/17)- |
| | 3′UTR-PolyA |
| 805 | 5′UTR-husec2_VH(1-18)_LL4_VL(1-18)_LL4_Hinge(C/S)_CH2_CH3(cah)(LS)(G1m17,1)-3′UTR-PolyA |
| 806 | 5′UTR-husec2_VH(1-18)_LL4_VL(1-18)_LL4_Hinge(C/S)_CH2(GAALIE)_CH3(cah)(LS)(G1m17,1)- |
| | 3′UTR-PolyA |
| 807 | 5′UTR-husec2_VH(1-18)_LL4_VL(1-18)_LL4_Hinge(C/S)_CH2(GAIE)_CH3(cah)(LS)(G1m17,1)- |
| | 3′UTR-PolyA |
| 808 | 5′UTR-husec2_VH(1-18)_LL4_VL(1-18)_LL4_Hinge(C/S)_CH2_CH3(cak)(LS)(G1m17,1)-3′UTR-PolyA |
| 809 | 5′UTR-husec2_VH(1-18)_LL4_VL(1-18)_LL4_Hinge(C/S)_CH2(GAALIE)_CH3(cak)(LS)(G1m17,1)- |
| | 3′UTR-PolyA |
| 810 | 5′UTR-husec2_VH(1-18)_LL4_VL(1-18)_LL4_Hinge(C/S)_CH2(GAIE)_CH3(cak)(LS)(G1m17,1)- |
| | 3′UTR-PolyA |
| 811 | 5′UTR-husec2_VL(1-18)_LL4_VH(1-18)_LL4_Hinge(C/S)_CH2_CH3(cah)(LS)(G1m3/17)-3′UTR-PolyA |
| 812 | 5′UTR-husec2_VL(1-18)_LL4_VH(1-18)_LL4_Hinge(C/S)_CH2(GAALIE)_CH3(cah)(LS)(G1m3/17)- |
| | 3′UTR-PolyA |
| 813 | 5′UTR-husec2_VL(1-18)_LL4_VH(1-18)_LL4_Hinge(C/S)_CH2(GAIE)_CH3(cah)(LS)(G1m3/17)- |
| | 3′UTR-PolyA |
| 814 | 5′UTR-husec2_VL(1-18)_LL4_VH(1-18)_LL4_Hinge(C/S)_CH2_CH3(cak)(LS)(G1m3/17)-3′UTR-PolyA |
| 815 | 5′UTR-husec2_VL(1-18)_LL4_VH(1-18)_LL4_Hinge(C/S)_CH2(GAALIE)_CH3(cak)(LS)(G1m3/17)- |
| | 3′UTR-PolyA |
| 816 | 5′UTR-husec2_VL(1-18)_LL4_VH(1-18)_LL4_Hinge(C/S)_CH2(GAIE)_CH3(cak)(LS)(G1m3/17)- |
| | 3′UTR-PolyA |
| 817 | 5′UTR-husec2_VL(1-18)_LL4_VH(1-18)_LL4_Hinge(C/S)_CH2_CH3(cah)(LS)(G1m3/17)-3′UTR-PolyA |
| 818 | 5′UTR-husec2_VL(1-18)_LL4_VH(1-18)_LL4_Hinge(C/S)_CH2(GAALIE)_CH3(cah)(LS)(G1m3/17)- |
| | 3′UTR-PolyA |
| 819 | 5′UTR-husec2_VL(1-18)_LL4_VH(1-18)_LL4_Hinge(C/S)_CH2(GAIE)_CH3(cah)(LS)(G1m3/17)- |
| | 3′UTR-PolyA |
| 820 | 5′UTR-husec2_VL(1-18)_LL4_VH(1-18)_LL4_Hinge(C/S)_CH2_CH3(cak)(LS)(G1m3/17)-3′UTR-PolyA |
| 821 | 5′UTR-husec2_VL(1-18)_LL4_VH(1-18)_LL4_Hinge(C/S)_CH2(GAALIE)_CH3(cak)(LS)(G1m3/17)- |
| | 3′UTR-PolyA |
| 822 | 5′UTR-husec2_VL(1-18)_LL4_VH(1-18)_LL4_Hinge(C/S)_CH2(GAIE)_CH3(cak)(LS)(G1m3/17)- |
| | 3′UTR-PolyA |
| 823 | 5′UTR-husec2_VL(1-18)_LL4_VH(1-18)_LL4_Hinge(C/S)_CH2_CH3(cah)(LS)(G1m17,1)-3′UTR-PolyA |
| 824 | 5′UTR-husec2_VL(1-18)_LL4_VH(1-18)_LL4_Hinge(C/S)_CH2(GAALIE)_CH3(cah)(LS)(G1m17,1)- |
| | 3′UTR-PolyA |
| 825 | 5′UTR-husec2_VL(1-18)_LL4_VH(1-18)_LL4_Hinge(C/S)_CH2(GAIE)_CH3(cah)(LS)(G1m17,1)- |
| | 3′UTR-PolyA |
| 826 | 5′UTR-husec2_VL(1-18)_LL4_VH(1-18)_LL4_Hinge(C/S)_CH2_CH3(cak)(LS)(G1m17,1)-3′UTR-PolyA |
| 827 | 5′UTR-husec2_VL(1-18)_LL4_VH(1-18)_LL4_Hinge(C/S)_CH2(GAALIE)_CH3(cak)(LS)(G1m17,1)- |
| | 3′UTR-PolyA |
| 828 | 5′UTR-husec2_VL(1-18)_LL4_VH(1-18)_LL4_Hinge(C/S)_CH2(GAIE)_CH3(cak)(LS)(G1m17,1)- |
| | 3′UTR-PolyA |
| 829 | 5′UTR-husec2_VH(1-18)_LL5_VL(1-18)_LL4_Hinge(C/S)_CH2_CH3(cah)(LS)(G1m3/17)-3′UTR-PolyA |
| 830 | 5′UTR-husec2_VH(1-18)_LL5_VL(1-18)_LL4_Hinge(C/S)_CH2(GAALIE)_CH3(cah)(LS)(G1m3/17)- |
| | 3′UTR-PolyA |
| 831 | 5′UTR-husec2_VH(1-18)_LL5_VL(1-18)_LL4_Hinge(C/S)_CH2(GAIE)_CH3(cah)(LS)(G1m3/17)- |
| | 3′UTR-PolyA |
| 832 | 5′UTR-husec2_VH(1-18)_LL5_VL(1-18)_LL4_Hinge(C/S)_CH2_CH3(cak)(LS)(G1m3/17)-3′UTR-PolyA |
| 833 | 5′UTR-husec2_VH(1-18)_LL5_VL(1-18)_LL4_Hinge(C/S)_CH2(GAALIE)_CH3(cak)(LS)(G1m3/17)- |
| | 3′UTR-PolyA |
| 834 | 5′UTR-husec2_VH(1-18)_LL5_VL(1-18)_LL4_Hinge(C/S)_CH2(GAIE)_CH3(cak)(LS)(G1m3/17)- |
| | 3′UTR-PolyA |
| 835 | 5′UTR-husec2_VH(1-18)_LL5_VL(1-18)_LL4_Hinge(C/S)_CH2_CH3(cah)(LS)(G1m3/17)-3′UTR-PolyA |
| 836 | 5′UTR-husec2_VH(1-18)_LL5_VL(1-18)_LL4_Hinge(C/S)_CH2(GAALIE)_CH3(cah)(LS)(G1m3/17)- |
| | 3′UTR-PolyA |
| 837 | 5′UTR-husec2_VH(1-18)_LL5_VL(1-18)_LL4_Hinge(C/S)_CH2(GAIE)_CH3(cah)(LS)(G1m3/17)- |
| | 3′UTR-PolyA |
| 838 | 5′UTR-husec2_VH(1-18)_LL5_VL(1-18)_LL4_Hinge(C/S)_CH2_CH3(cak)(LS)(G1m3/17)-3′UTR-PolyA |
| 839 | 5′UTR-husec2_VH(1-18)_LL5_VL(1-18)_LL4_Hinge(C/S)_CH2(GAALIE)_CH3(cak)(LS)(G1m3/17)- |
| | 3′UTR-PolyA |
| 840 | 5′UTR-husec2_VH(1-18)_LL5_VL(1-18)_LL4_Hinge(C/S)_CH2(GAIE)_CH3(cak)(LS)(G1m3/17)- |
| | 3′UTR-PolyA |
| 841 | 5′UTR-husec2_VH(1-18)_LL5_VL(1-18)_LL4_Hinge(C/S)_CH2_CH3(cah)(LS)(G1m17,1)-3′UTR-PolyA |
| 842 | 5′UTR-husec2_VH(1-18)_LL5_VL(1-18)_LL4_Hinge(C/S)_CH2(GAALIE)_CH3(cah)(LS)(G1m17,1)- |
| | 3′UTR-PolyA |
| 843 | 5′UTR-husec2_VH(1-18)_LL5_VL(1-18)_LL4_Hinge(C/S)_CH2(GAIE)_CH3(cah)(LS)(G1m17,1)- |
| | 3′UTR-PolyA |
| 844 | 5′UTR-husec2_VH(1-18)_LL5_VL(1-18)_LL4_Hinge(C/S)_CH2_CH3(cak)(LS)(G1m17,1)-3′UTR-PolyA |
| 845 | 5′UTR-husec2_VH(1-18)_LL5_VL(1-18)_LL4_Hinge(C/S)_CH2(GAALIE)_CH3(cak)(LS)(G1m17,1)- |
| | 3′UTR-PolyA |
| 846 | 5′UTR-husec2_VH(1-18)_LL5_VL(1-18)_LL4_Hinge(C/S)_CH2(GAIE)_CH3(cak)(LS)(G1m17,1)- |
| | 3′UTR-PolyA |
| 847 | 5′UTR-husec2_VL(1-18)_LL5_VH(1-18)_LL4_Hinge(C/S)_CH2_CH3(cah)(LS)(G1m3/17)-3′UTR-PolyA |
| 848 | 5′UTR-husec2_VL(1-18)_LL5_VH(1-18)_LL4_Hinge(C/S)_CH2(GAALIE)_CH3(cah)(LS)(G1m3/17)- |
| | 3′UTR-PolyA |
| 849 | 5′UTR-husec2_VL(1-18)_LL5_VH(1-18)_LL4_Hinge(C/S)_CH2(GAIE)_CH3(cah)(LS)(G1m3/17)- |
| | 3′UTR-PolyA |
| 850 | 5′UTR-husec2_VL(1-18)_LL5_VH(1-18)_LL4_Hinge(C/S)_CH2_CH3(cak)(LS)(G1m3/17)-3′UTR-PolyA |
| 851 | 5′UTR-husec2_VL(1-18)_LL5_VH(1-18)_LL4_Hinge(C/S)_CH2(GAALIE)_CH3(cak)(LS)(G1m3/17)- |
| | 3′UTR-PolyA |
| 852 | 5′UTR-husec2_VL(1-18)_LL5_VH(1-18)_LL4_Hinge(C/S)_CH2(GAIE)_CH3(cak)(LS)(G1m3/17)- |
| | 3′UTR-PolyA |
| 853 | 5′UTR-husec2_VL(1-18)_LL5_VH(1-18)_LL4_Hinge(C/S)_CH2_CH3(cah)(LS)(G1m3/17)-3′UTR-PolyA |
| 854 | 5′UTR-husec2_VL(1-18)_LL5_VH(1-18)_LL4_Hinge(C/S)_CH2(GAALIE)_CH3(cah)(LS)(G1m3/17)- |
| | 3′UTR-PolyA |
| 855 | 5′UTR-husec2_VL(1-18)_LL5_VH(1-18)_LL4_Hinge(C/S)_CH2(GAIE)_CH3(cah)(LS)(G1m3/17)- |
| | 3′UTR-PolyA |
| 856 | 5′UTR-husec2_VL(1-18)_LL5_VH(1-18)_LL4_Hinge(C/S)_CH2_CH3(cak)(LS)(G1m3/17)-3′UTR-PolyA |
| 857 | 5′UTR-husec2_VL(1-18)_LL5_VH(1-18)_LL4_Hinge(C/S)_CH2(GAALIE)_CH3(cak)(LS)(G1m3/17)- |
| | 3′UTR-PolyA |
| 858 | 5′UTR-husec2_VL(1-18)_LL5_VH(1-18)_LL4_Hinge(C/S)_CH2(GAIE)_CH3(cak)(LS)(G1m3/17)- |
| | 3′UTR-PolyA |
| 859 | 5′UTR-husec2_VL(1-18)_LL5_VH(1-18)_LL4_Hinge(C/S)_CH2_CH3(cah)(LS)(G1m17,1)-3′UTR-PolyA |
| 860 | 5′UTR-husec2_VL(1-18)_LL5_VH(1-18)_LL4_Hinge(C/S)_CH2(GAALIE)_CH3(cah)(LS)(G1m17,1)- |
| | 3′UTR-PolyA |
| 861 | 5′UTR-husec2_VL(1-18)_LL5_VH(1-18)_LL4_Hinge(C/S)_CH2(GAIE)_CH3(cah)(LS)(G1m17,1)- |
| | 3′UTR-PolyA |
| 862 | 5′UTR-husec2_VL(1-18)_LL5_VH(1-18)_LL4_Hinge(C/S)_CH2_CH3(cak)(LS)(G1m17,1)-3′UTR-PolyA |
| 863 | 5′UTR-husec2_VL(1-18)_LL5_VH(1-18)_LL4_Hinge(C/S)_CH2(GAALIE)_CH3(cak)(LS)(G1m17,1)- |
| | 3′UTR-PolyA |
| 864 | 5′UTR-husec2_VL(1-18)_LL5_VH(1-18)_LL4_Hinge(C/S)_CH2(GAIE)_CH3(cak)(LS)(G1m17,1)- |
| | 3′UTR-PolyA |

### B. RNA Formats

[0605] At least three distinct formats useful for RNA compositions (e.g., pharmaceutical compositions) have been developed, namely non-modified uridine containing mRNA (uRNA), nucleoside-modified mRNA (modRNA), and self-amplifying mRNA (saRNA). Each of these platforms displays unique features. In general, in all three formats, RNA is capped, contains open reading frames (ORFs) flanked by untranslated regions (UTR), and have a polyA-tail at the 3′ end. An ORF of an uRNA and modRNA vectors encode an antibody agent or portion thereof. An saRNA has multiple ORFs.

[0606] In some embodiments, the RNA described herein may have modified nucleosides. In some embodiments, the RNA comprises a modified nucleoside in place of at least one (e.g. every) uridine.

[0607] The term “uracil,” as used herein, describes one of the nucleobases that can occur in the nucleic acid of RNA. The structure of uracil is:

[chemical structure]

[0608] The term “uridine,” as used herein, describes one of the nucleosides that can occur in RNA. The structure of uridine is:

[chemical structure]

[0609] UTP (uridine 5′-triphosphate) has the following structure:

[chemical structure]

[0610] Pseudo-UTP (pseudouridine 5′-triphosphate) has the following structure:

[chemical structure]

[0611] “Pseudouridine” is one example of a modified nucleoside that is an isomer of uridine, where the uracil is attached to the pentose ring via a carbon-carbon bond instead of a nitrogen-carbon glycosidic bond.

[0612] Another exemplary modified nucleoside is N1-methyl-pseudouridine (m1ψ), which has the structure:

[chemical structure]

[0613] N1-methyl-pseudo-UTP has the following structure:

[chemical structure]

[0614] Another exemplary modified nucleoside is 5-methyl-uridine (m5U), which has the structure:

[chemical structure]

[0615] In some embodiments, one or more uridine in the RNA described herein is replaced by a modified nucleoside. In some embodiments, the modified nucleoside is a modified uridine.

[0616] In some embodiments, RNA comprises a modified nucleoside in place of at least one uridine. In some embodiments, RNA comprises a modified nucleoside in place of each uridine.

[0617] In some embodiments, the modified nucleoside is independently selected from pseudouridine (ψ), N1-methyl-pseudouridine (m1ψ), and 5-methyl-uridine (m5U). In some embodiments, the modified nucleoside comprises pseudouridine (ψ). In some embodiments, the modified nucleoside comprises N1-methyl-pseudouridine (m1ψ). In some embodiments, the modified nucleoside comprises 5-methyl-uridine (m5U). In some embodiments, RNA may comprise more than one type of modified nucleoside, and the modified nucleosides are independently selected from pseudouridine (ψ), N1-methyl-pseudouridine (m1ψ), and 5-methyl-uridine (m5U). In some embodiments, the modified nucleosides comprise pseudouridine (ψ) and N1-methyl-pseudouridine (m1ψ). In some embodiments, the modified nucleosides comprise pseudouridine (ψ) and 5-methyl-uridine (m5U). In some embodiments, the modified nucleosides comprise N1-methyl-pseudouridine (m1ψ) and 5-methyl-uridine (m5U). In some embodiments, the modified nucleosides comprise pseudouridine (ψ), N1-methyl-pseudouridine (m1ψ), and 5-methyl-uridine (m5U).

[0618] In some embodiments, the modified nucleoside replacing one or more, e.g., all, uridine in the RNA may be any one or more of 3-methyl-uridine (m3U), 5-methoxy-uridine (mo5U), 5-aza-uridine, 6-aza-uridine, 2-thio-5-aza-uridine, 2-thio-uridine (s2U), 4-thio-uridine (s4U), 4-thio-pseudouridine, 2-thio-pseudouridine, 5-hydroxy-uridine (ho5U), 5-aminoallyl-uridine, 5-halo-uridine (e.g., 5-iodo-uridine or 5-bromo-uridine), uridine 5-oxyacetic acid (cmo5U), uridine 5-oxyacetic acid methyl ester (mcmo5U), 5-carboxymethyl-uridine (cm5U), 1-carboxymethyl-pseudouridine, 5-carboxyhydroxymethyl-uridine (chm5U), 5-carboxyhydroxymethyl-uridine methyl ester (mchm5U), 5-methoxycarbonylmethyl-uridine (mcm5U), 5-methoxycarbonylmethyl-2-thio-uridine (mcm5s2U), 5-aminomethyl-2-thio-uridine (nm5s2U), 5-methylaminomethyl-uridine (mnm5U), 1-ethyl-pseudouridine, 5-methylaminomethyl-2-thio-uridine (mnm5s2U), 5-methylaminomethyl-2-seleno-uridine (mnm5se2U), 5-carbamoylmethyl-uridine (ncm5U), 5-carboxymethylaminomethyl-uridine (cmnm5U), 5-carboxymethylaminomethyl-2-thio-uridine (cmnm5s2U), 5-propynyl-uridine, 1-propynyl-pseudouridine, 5-taurinomethyl-uridine (τm5U), 1-taurinomethyl-pseudouridine, 5-taurinomethyl-2-thio-uridine (τm5s2U), 1-taurinomethyl-4-thio-pseudouridine), 5-methyl-2-thio-uridine (m5s2U), 1-methyl-4-thio-pseudouridine (m1s4ψ), 4-thio-1-methyl-pseudouridine, 3-methyl-pseudouridine (m3ψ), 2-thio-1-methyl-pseudouridine, 1-methyl-1-deaza-pseudouridine, 2-thio-1-methyl-1-deaza-pseudouridine, dihydrouridine (D), dihydropseudouridine, 5,6-dihydrouridine, 5-methyl-dihydrouridine (m5D), 2-thio-dihydrouridine, 2-thio-dihydropseudouridine, 2-methoxy-uridine, 2-methoxy-4-thio-uridine, 4-methoxy-pseudouridine, 4-methoxy-2-thio-pseudouridine, N1-methyl-pseudouridine, 3-(3-amino-3-carboxypropyl)uridine (acp3U), 1-methyl-3-(3-amino-3-carboxypropyl)pseudouridine (acp3 ψ), 5-(isopentenylaminomethyl)uridine (inm5U), 5-(isopentenylaminomethyl)-2-thio-uridine (inm5s2U), α-thio-uridine, 2′-O-methyl-uridine (Um), 5,2′-O-dimethyl-uridine (m5Um), 2′-O-methyl-pseudouridine (ψm), 2-thio-2′-O-methyl-uridine (s2Um), 5-methoxycarbonylmethyl-2′-O-methyl-uridine (mcm5Um), 5-carbamoylmethyl-2′-O-methyl-uridine (ncm5Um), 5-carboxymethylaminomethyl-2′-O-methyl-uridine (cmnm5Um), 3,2′-O-dimethyl-uridine (m3Um), 5-(isopentenylaminomethyl)-2′-O-methyl-uridine (inm5Um), 1-thio-uridine, deoxythymidine, 2′-F-ara-uridine, 2′-F-uridine, 2′-OH-ara-uridine, 5-(2-carbomethoxyvinyl)uridine, 5-[3-(1-E-propenylamino)uridine, or any other modified uridine known in the art.

[0619] In some embodiments, the RNA comprises other modified nucleosides or comprises further modified nucleosides, e.g., modified cytidine. For example, in some embodiments, in the RNA 5-methylcytidine is substituted partially or completely, preferably completely, for cytidine. In some embodiments, the RNA comprises 5-methylcytidine and one or more selected from pseudouridine (ψ), N1-methyl-pseudouridine (m1ψ), and 5-methyl-uridine (m5U). In some embodiments, the RNA comprises 5-methylcytidine and N1-methyl-pseudouridine (m1ψ). In some embodiments, the RNA comprises 5-methylcytidine in place of each cytidine and N1-methyl-pseudouridine (m1ψ) in place of each uridine.

[0620] In some embodiments of the present disclosure, the RNA is “replicon RNA” or simply a “replicon,” in particular “self-replicating RNA” or “self-amplifying RNA.” In one particularly preferred embodiment, the replicon or self-replicating RNA is derived from or comprises elements derived from a single-stranded (ss) RNA virus, in particular a positive-stranded ssRNA virus, such as an alphavirus. Alphaviruses are typical representatives of positive-stranded RNA viruses. Alphaviruses replicate in the cytoplasm of infected cells (for review of the alphaviral life cycle see José et al., Future Microbiol., 2009, vol. 4, pp. 837-856, which is incorporated herein by reference in its entirety). The total genome length of many alphaviruses typically ranges between 11,000 and 12,000 nucleotides, and the genomic RNA typically has a 5′-cap, and a 3′ poly(A) tail. The genome of alphaviruses encodes non-structural proteins (involved in transcription, modification and replication of viral RNA and in protein modification) and structural proteins (forming the virus particle). There are typically two open reading frames (ORFs) in the genome. The four non-structural proteins (nsP1-nsP4) are typically encoded together by a first ORF beginning near the 5′ terminus of the genome, while alphavirus structural proteins are encoded together by a second ORF which is found downstream of the first ORF and extends near the 3′ terminus of the genome. Typically, the first ORF is larger than the second ORF, the ratio being roughly 2:1. In cells infected by an alphavirus, only the nucleic acid sequence encoding non-structural proteins is translated from the genomic RNA, while the genetic information encoding structural proteins is translatable from a subgenomic transcript, which is an RNA molecule that resembles eukaryotic messenger RNA (mRNA; Gould et al., 2010, Antiviral Res., vol. 87 pp. 111-124). Following infection, i.e. at early stages of the viral life cycle, the (+) stranded genomic RNA directly acts like a messenger RNA for the translation of the open reading frame encoding the non-structural poly-protein (nsP1234).

[0621] Alphavirus-derived vectors have been proposed for delivery of foreign genetic information into target cells or target organisms. In simple approaches, a first ORF encodes an alphavirus-derived RNA-dependent RNA polymerase (replicase), which upon translation mediates self-amplification of the RNA. A second ORF encoding alphaviral structural proteins is replaced by an open reading frame encoding a protein of interest, e.g., an antibody agent. Alphavirus-based trans-replication systems rely on alphavirus nucleotide sequence elements on two separate nucleic acid molecules: one nucleic acid molecule encodes a viral replicase, and the other nucleic acid molecule is capable of being replicated by said replicase in trans (hence the designation trans-replication system). Trans-replication requires the presence of both these nucleic acid molecules in a given host cell. The nucleic acid molecule capable of being replicated by the replicase in trans must comprise certain alphaviral sequence elements to allow recognition and RNA synthesis by the alphaviral replicase.

[0622] Features of a non-modified uridine platform may include, for example, one or more of intrinsic adjuvant effect, as well as good tolerability and safety. Features of modified uridine (e.g., pseudouridine) platform may include reduced adjuvant effect, blunted immune innate immune sensor activating capacity and thus good tolerability and safety. Features of self-amplifying platform may include, for example, long duration of protein expression, good tolerability and safety, higher likelihood for efficacy with very low vaccine dose.

[0623] The present disclosure provides particular RNA constructs optimized, for example, for improved manufacturability, encapsulation, expression level (and/or timing), etc. Certain components are discussed below, and certain preferred embodiments are exemplified herein.

### C. Codon Optimization and GC Enrichment

[0624] As used herein, the term “codon-optimized” refers to alteration of codons in a coding region of a nucleic acid molecule (e.g., a polyribonucleotide) to reflect the typical codon usage of a host organism (e.g., a subject receiving a nucleic acid molecule (e.g., a polyribonucleotide)) without preferably altering the amino acid sequence encoded by the nucleic acid molecule. Within the context of the present disclosure, in some embodiments, coding regions are codon-optimized for optimal expression in a subject to be treated using the RNA molecules described herein. In some embodiments, codon-optimization may be performed such that codons for which frequently occurring tRNAs are available are inserted in place of “rare codons.” In some embodiments, codon-optimization may include increasing guanosine/cytosine (G/C) content of a coding region of RNA described herein as compared to the G/C content of the corresponding coding sequence of a wild type RNA, wherein the amino acid sequence encoded by the RNA is preferably not modified compared to the amino acid sequence.

[0625] In some embodiments, a coding sequence (also referred to as a “coding region”) is codon optimized for expression in the subject to whom a composition (e.g., a pharmaceutical composition) is to be administered (e.g., a human). Thus, in some embodiments, sequences in such a polynucleotide (e.g., a polyribonucleotide) may differ from wild type sequences encoding the relevant antigen or fragment or epitope thereof, even when the amino acid sequence of the antigen or fragment or epitope thereof is wild type.

[0626] In some embodiments, strategies for codon optimization for expression in a relevant subject (e.g., a human), and even, in some cases, for expression in a particular cell or tissue.

[0627] Various species exhibit particular bias for certain codons of a particular amino acid. Without wishing to be bound by any one theory, codon bias (differences in codon usage between organisms) often correlates with the efficiency of translation of messenger RNA (mRNA), which is in turn believed to be dependent on, among other things, the properties of the codons being translated and the availability of particular transfer RNA (tRNA) molecules. The predominance of selected tRNAs in a cell may generally be a reflection of the codons used most frequently in peptide synthesis. Accordingly, genes may be tailored for optimal gene expression in a given organism based on codon optimization. Codon usage tables are available, for example, at the “Codon Usage Database” available at www.kazusa.orjp/codon/and these tables may be adapted in a number of ways. Computer algorithms for codon optimizing a particular sequence for expression in a particular subject or its cells are also available, such as Gene Forge (Aptagen; Jacobus, PA), are also available.

[0628] In some embodiments, a polynucleotide (e.g., a polyribonucleotide) of the present disclosure is codon optimized, wherein the codons in the polynucleotide (e.g., the polyribonucleotide) are adapted to human codon usage (herein referred to as “human codon optimized polynucleotide”). Codons encoding the same amino acid occur at different frequencies in a subject, e.g., a human. Accordingly, in some embodiments, the coding sequence of a polynucleotide of the present disclosure is modified such that the frequency of the codons encoding the same amino acid corresponds to the naturally occurring frequency of that codon according to the human codon usage, e.g., as shown in Table 7. For example, in the case of the amino acid Ala, the wild type coding sequence is preferably adapted in a way that the codon “GCC” is used with a frequency of 0.40, the codon “GCT” is used with a frequency of 0.28, the codon “GCA” is used with a frequency of 0.22 and the codon “GCG” is used with 30 a frequency of 0.10 etc. (see Table 7). Accordingly, in some embodiments, such a procedure (as exemplified for Ala) is applied for each amino acid encoded by the coding sequence of a polynucleotide to obtain sequences adapted to human codon usage.

TABLE 7
Human codon usage table with frequencies
indicated for each amino acid.

| Amino acid | codon | frequency | Amino acid | codon | frequency |
|---|---|---|---|---|---|
| Ala | GCG | 0.10 | Pro | CCG | 0.11 |
| Ala | GCA | 0.22 | Pro | CCA | 0.27 |
| Ala | GCT | 0.28 | Pro | CCT | 0.29 |
| Ala | GCC* | 0.40 | Pro | CCC* | 0.33 |
| Cys | TGT | 0.42 | Gin | CAG* | 0.73 |
| Cys | TGC* | 0.58 | Gin | CAA | 0.27 |
| Asp | GAT | 0.44 | Arg | AGG | 0.22 |
| Asp | GAC* | 0.56 | Arg | AGA* | 0.21 |
| Glu | GAG* | 0.59 | Arg | CGG | 0.19 |
| Glu | GAA | 0.41 | Arg | CGA | 0.10 |
| Phe | TTT | 0.43 | Arg | CGT | 0.09 |
| Phe | TTC* | 0.57 | Arg | CGC | 0.19 |
| Gly | GGG | 0.23 | Ser | AGT | 0.14 |
| Gly | GGA | 0.26 | Ser | AGC* | 0.25 |
| Gly | GGT | 0.18 | Ser | TCG | 0.06 |
| Gly | GGC* | 0.33 | Ser | TCA | 0.15 |
| His | CAT | 0.41 | Ser | TCT | 0.18 |
| His | CAC* | 0.59 | Ser | TCC | 0.23 |
| Ile | ATA | 0.14 | Thr | ACG | 0.12 |
| Ile | ATT | 0.35 | Thr | ACA | 0.27 |
| Ile | ATC* | 0.52 | Thr | ACT | 0.23 |
| Lys | AAG* | 0.60 | Tor | ACC* | 0.38 |
| Lys | AAA | 0.40 | Val | GTG* | 0.48 |
| Leu | TTG | 0.12 | Val | GTA | 0.10 |
| Leu | TTA | 0.06 | Val | GTT | 0.17 |
| Leu | CTG* | 0.43 | Val | GTC | 0.25 |
| Leu | CTA | 0.07 | Trp | TGG* | 1 |
| Leu | CTT | 0.12 | Tyr | TAT | 0 42 |
| Lou | CTC | 0.20 | Tyr | TAC* | 0.58 |
| Met | ATG* | 1 | Stop | TGA* | 0 61 |
| Asn | AAT | 0.44 | Stop | TAG | 0.17 |
| Asn | AAC* | 0.56 | Stop | TAA | 0.22 |

[0629] Certain strategies for codon optimization and/or G/C enrichment for human expression are described in WO2002/098443, which is incorporated by reference herein in its entirety. In some embodiments, a coding sequence may be optimized using a multiparametric optimization strategy. In some embodiments, optimization parameters may include parameters that influence protein expression, which can be, for example, impacted on a transcription level, an mRNA level, and/or a translational level. In some embodiments, exemplary optimization parameters include, but are not limited to transcription-level parameters (including, e.g., GC content, consensus splice sites, cryptic splice sites, SD sequences, TATA boxes, termination signals, artificial recombination sites, and combinations thereof); mRNA-level parameters (including, e.g., RNA instability motifs, ribosomal entry sites, repetitive sequences, and combinations thereof); translation-level parameters (including, e.g., codon usage, premature poly(A) sites, ribosomal entry sites, secondary structures, and combinations thereof); or combinations thereof. In some embodiments, a coding sequence may be optimized by a GeneOptimizer algorithm as described in Fath et al. “Multiparameter RNA and Codon Optimization: A Standardized Tool to Assess and Enhance Autologous Mammalian Gene Expression” PLOS ONE 6 (3): e17596; Rabb et al., “The GeneOptimizer Algorithm: using a sliding window approach to cope with the vast sequence space in multiparameter DNA sequence optimization” Systems and Synthetic Biology (2010) 4:215-225; and Graft et al. “Codon-optimized genes that enable increased heterologous expression in mammalian cells and elicit efficient immune responses in mice after vaccination of naked DNA” Methods Mol Med (2004) 94:197-210, the entire content of each of which is incorporated herein for the purposes described herein. In some embodiments, a coding sequence may be optimized by Eurofins' adaption and optimization algorithm “GENEius” as described in Eurofins' Application Notes: Eurofins' adaption and optimization software “GENEius” in comparison to other optimization algorithms, the entire content of which is incorporated by reference for the purposes described herein.

[0630] In some embodiments, a coding sequence utilized in accordance with the present disclosure has G/C content of which increased compared to a wild type coding sequence for a relevant antibody agent directed against an HIV (e.g., HIV-1) polypeptide, or fragment or epitope thereof (e.g., a CD4 binding site). In some embodiments, guanosine/cytidine (G/C) content of a coding region is modified relative to a wild type coding sequence for a relevant antibody agent directed against an HIV (e.g., HIV-1) polypeptide, or fragment or epitope thereof (e.g., a CD4 binding site), but the amino acid sequence encoded by the polyribonucleotide not modified.

[0631] Without wishing to be bound by any particular theory, it is proposed that GC enrichment may improve translation of a payload sequence. Typically, sequences having an increased G (guanosine)/C (cytidine) content are more stable than sequences having an increased A (adenosine)/U (uridine) content. In respect to the fact that several codons code for one and the same amino acid (so-called degeneration of the genetic code), the most favorable codons for the stability can be determined (so-called alternative codon usage). Depending on the amino acid to be encoded by a polyribonucleotide, there are various possibilities for modification of the ribonucleic acid sequence, compared to its wild type sequence. In particular, codons which contain A and/or U nucleosides can be modified by substituting these codons by other codons, which code for the same amino acids but contain no A and/or U or contain a lower content of A and/or U nucleosides.

[0632] In some embodiments, G/C content of a coding region of a polyribonucleotide described herein is increased by at least 1%, at least 2%, at least 3%, at least 4%, at least 5%, at least 6%, or even more compared to the G/C content of the coding region prior to codon optimization, e.g., of the wild type RNA. In some embodiments, G/C content of a coding region of a polyribonucleotide described herein is decreased by at least 1%, at least 2%, at least 3%, at least 4%, at least 5%, at least 6%, or even more compared to the G/C content of the coding region prior to codon optimization, e.g., of the wild type RNA.

[0633] In some embodiments, stability and translation efficiency of an polyribonucleotide may incorporate one or more elements established to contribute to stability and/or translation efficiency of the polyribonucleotide; exemplary such elements are described, for example, in PCT/EP2006/009448 incorporated herein by reference. In some embodiments, to increase expression of a polyribonucleotide used according to the present disclosure, a polyribonucleotide may be modified within the coding region, i.e., the sequence encoding the expressed peptide or protein, without altering the sequence of the expressed peptide or protein, for example so as to increase the GC-content to increase mRNA stability and/or to perform a codon optimization and, thus, enhance translation in cells.

### IV. RNA Delivery Technologies

[0634] Provided polyribonucleotides may be delivered for therapeutic applications described herein using any appropriate methods known in the art, including, e.g., delivery as naked RNAs, or delivery mediated by viral and/or non-viral vectors, polymer-based vectors, lipid-based vectors, nanoparticles (e.g., lipid nanoparticles, polymeric nanoparticles, lipid-polymer hybrid nanoparticles, etc.), and/or peptide-based vectors. See, e.g., Wadhwa et al. “Opportunities and Challenges in the Delivery of mRNA-Based Vaccines” Pharmaceutics (2020) 102 (27 pages), the content of which is incorporated herein by reference, for information on various approaches that may be useful for delivery polyribonucleotides described herein.

[0635] In some embodiments, one or more polyribonucleotides can be formulated with lipid nanoparticles for delivery (e.g., administration).

[0636] In some embodiments, lipid nanoparticles can be designed to protect polyribonucleotides from extracellular RNases and/or engineered for systemic delivery of the RNA to target cells (e.g., liver cells). In some embodiments, such lipid nanoparticles may be particularly useful to deliver polyribonucleotides when polyribonucleotides are intravenously or intramuscularly administered to a subject.

### A. Particles for Delivery of at Least One Polyribonucleotide

[0637] Polyribonucleotides provided herein can be delivered by particles. In the context of the present disclosure, the term “particle” relates to a structured entity formed by molecules or molecule complexes. In some embodiments, the term “particle” relates to a micro- or nano-sized structure, such as a micro- or nano-sized compact structure dispersed in a medium. In some embodiments, a particle is a nucleic acid containing particle such as a particle comprising a polyribonucleotide.

[0638] Electrostatic interactions between positively charged molecules such as polymers and lipids and negatively charged nucleic acid (e.g., a polyribonucleotide) are involved in particle formation. This results in complexation and spontaneous formation of nucleic acid particles (e.g., ribonucleic acid particles). In some embodiments, a nucleic acid particle (e.g., ribonucleic acid particle) is a nanoparticle.

[0639] A “nucleic acid particle” (e.g., a ribonucleic acid particle) are particles that encompass or contain a nucleic acid, and are used to deliver nucleic acid (e.g., a polyribonucleotide) to a target site of interest (e.g., cell, tissue, organ, and the like). A nucleic acid particle (e.g., a ribonucleic acid particle) may be formed from (i) at least one cationic or cationically ionizable lipid or lipid-like material, (ii) at least one cationic polymer such as protamine, or a mixture of (i) and (ii), and (iii) nucleic acid (e.g., a polyribonucleotide). Nucleic acid particles (e.g., a ribonucleic acid particle) include lipid nanoparticles (lipid nanoparticle) and lipoplexes (LPX).

[0640] In some embodiments, nucleic acid particles (e.g., ribonucleic acid particles) comprise more than one type of nucleic acid molecules (e.g., polyribonucleotides), where the molecular parameters of the nucleic acid molecules may be similar or different from each other, like with respect to molar mass or fundamental structural elements such as molecular architecture, capping, coding regions or other features.

[0641] In some embodiments, provided nucleic acid particles (e.g., ribonucleic acid particles) can comprise lipid nanoparticles. As used in the present disclosure, “nanoparticle” refers to a particle having an average diameter suitable for parenteral administration. In various embodiments, lipid nanoparticles can have an average size (e.g., mean diameter) of about 30 nm to about 150 nm, about 40 nm to about 150 nm, about 50 nm to about 150 nm, about 60 nm to about 130 nm, about 70 nm to about 110 nm, about 70 nm to about 100 nm, about 70 to about 90 nm, or about 70 nm to about 80 nm. In some embodiments, lipid nanoparticles in accordance with the present disclosure can have an average size (e.g., mean diameter) of about 50 nm to about 100 nm. In some embodiments, lipid nanoparticles may have an average size (e.g., mean diameter) of about 50 nm to about 150 nm. In some embodiments, lipid nanoparticles may have an average size (e.g., mean diameter) of about 60 nm to about 120 nm. In some embodiments, lipid nanoparticles in accordance with the present disclosure can have an average size (e.g., mean diameter) of about 30 nm, 35 nm, 40 nm, 45 nm, 50 nm, 55 nm, 60 nm, 65 nm, 70 nm, 75 nm, 80 nm, 85 nm, 90 nm, 95 nm, 100 nm, 105 nm, 110 nm, 115 nm, 120 nm, 125 nm, 130 nm, 135 nm, 140 nm, 145 nm, or 150 nm.

[0642] Nucleic acid particles (e.g., ribonucleic acid particles) described herein may exhibit a polydispersity index less than about 0.5, less than about 0.4, less than about 0.3, or about 0.2 or less. By way of example, the nucleic acid particles (e.g., ribonucleic acid particles) can exhibit a polydispersity index in a range of about 0.1 to about 0.3 or about 0.2 to about 0.3.

[0643] Nucleic acid particles (e.g., ribonucleic acid particles) described herein can be characterized by an “N/P ratio,” which is the molar ratio of cationic (nitrogen) groups (the “N” in N/P) in the cationic polymer to the anionic (phosphate) groups (the “P” in N/P) in RNA. It is understood that a cationic group is one that is either in cationic form (e.g., N⁺), or one that is ionizable to become cationic. Use of a single number in an N/P ratio (e.g., an N/P ratio of about 5) is intended to refer to that number over 1, e.g., an N/P ratio of about 5 is intended to mean 5:1. In some embodiments, a nucleic acid particle (e.g., a ribonucleic acid particle) described herein has an N/P ratio greater than or equal to 5. In some embodiments, a nucleic acid particle (e.g., a ribonucleic acid particle) described herein has an N/P ratio that is about 5, 6, 7, 8, 9, or 10. In some embodiments, an N/P ratio for a nucleic acid particle (e.g., a ribonucleic acid particle) described herein is from about 10 to about 50. In some embodiments, an N/P ratio for a nucleic acid particle (e.g., a ribonucleic acid particle) described herein is from about 10 to about 70. In some embodiments, an N/P ratio for a nucleic acid particle (e.g., a ribonucleic acid particle) described herein is from about 10 to about 120.

[0644] Nucleic acid particles (e.g., ribonucleic acid particles) described herein can be prepared using a wide range of methods that may involve obtaining a colloid from at least one cationic or cationically ionizable lipid or lipid-like material and/or at least one cationic polymer and mixing the colloid with nucleic acid to obtain nucleic acid particles.

[0645] The term “colloid” as used herein relates to a type of homogeneous mixture in which dispersed particles do not settle out. The insoluble particles in the mixture can be microscopic, with particle sizes between 1 and 1000 nanometers. The mixture may be termed a colloid or a colloidal suspension. Sometimes the term “colloid” only refers to the particles in the mixture and not the entire suspension.

[0646] The term “average diameter” or “mean diameter” refers to the mean hydrodynamic diameter of particles as measured by dynamic laser light scattering (DLS) with data analysis using the so-called cumulant algorithm, which provides as results the so-called Z-average with the dimension of a length, and the polydispersity index (PI), which is dimensionless (Koppel, D., J. Chem. Phys. 57, 1972, pp 4814-4820, ISO 13321, which is herein incorporated by reference). Here “average diameter,” “mean diameter,” “diameter,” or “size” for particles is used synonymously with this value of the Z-average.

[0647] The “polydispersity index” is preferably calculated based on dynamic light scattering measurements by the so-called cumulant analysis as mentioned in the definition of the “average diameter.” Under certain prerequisites, it can be taken as a measure of the size distribution of an ensemble of ribonucleic acid nanoparticles (e.g., ribonucleic acid nanoparticles).

[0648] Different types of nucleic acid particles have been described previously to be suitable for delivery of nucleic acid in particulate form (e.g. Kaczmarek, J. C. et al., 2017, Genome Medicine 9, 60, which is herein incorporated by reference). For non-viral nucleic acid delivery vehicles, nanoparticle encapsulation of nucleic acid physically protects nucleic acid from degradation and, depending on the specific chemistry, can aid in cellular uptake and endosomal escape.

[0649] The present disclosure describes particles comprising nucleic acid (e.g., a polyribonucleotide), at least one cationic or cationically ionizable lipid or lipid-like material, and/or at least one cationic polymer which associate with the nucleic acid (e.g., a polyribonucleotide) to form nucleic acid particles (e.g., ribonucleic acid particles, e.g., ribonucleic acid nanoparticles) and compositions comprising such particles. The nucleic acid particles (e.g., ribonucleic acid particles, e.g., ribonucleic acid nanoparticles) may comprise nucleic acid (e.g., a polyribonucleotide) which is complexed in different forms by non-covalent interactions to the particle. The particles described herein are not viral particles, in particular, they are not infectious viral particles, i.e., they are not able to virally infect cells.

[0650] Some embodiments described herein relate to compositions, methods and uses involving more than one, e.g., 2, 3, 4, 5, 6 or even more nucleic acid species (e.g., polyribonucleotide species).

[0651] In a nucleic acid particle (e.g., ribonucleic acid particle, e.g., ribonucleic acid nanoparticle) formulation, it is possible that each nucleic acid species (e.g., polyribonucleotide species) is separately formulated as an individual nucleic acid particle (e.g., ribonucleic acid particle, e.g., ribonucleic acid nanoparticle) formulation. In that case, each individual nucleic acid particle (e.g., ribonucleic acid particle, e.g., ribonucleic acid nanoparticle) formulation will comprise one nucleic acid species (e.g., polyribonucleotide species). The individual nucleic acid particle (e.g., ribonucleic acid particle, e.g., ribonucleic acid nanoparticle) formulations may be present as separate entities, e.g., in separate containers. Such formulations are obtainable by providing each nucleic acid species (e.g., polyribonucleotide species) separately (typically each in the form of a nucleic acid-containing solution) together with a particle-forming agent, thereby allowing the formation of particles. Respective particles will contain exclusively the specific nucleic acid species (e.g., polyribonucleotide species) that is being provided when the particles are formed (individual particulate formulations).

[0652] In some embodiments, a composition such as a pharmaceutical composition comprises more than one individual nucleic acid particle (e.g., ribonucleic acid particle, e.g., ribonucleic acid nanoparticle) formulation. Respective pharmaceutical compositions are referred to as “mixed particulate formulations.” Mixed particulate formulations according to the invention are obtainable by forming, separately, individual nucleic acid particle (e.g., ribonucleic acid particle, e.g., ribonucleic acid nanoparticle) formulations, as described above, followed by a step of mixing of the individual nucleic acid particle (e.g., ribonucleic acid particle, e.g., ribonucleic acid nanoparticle) formulations. By the step of mixing, a formulation comprising a mixed population of nucleic acid-containing particles is obtainable. Individual nucleic acid particle (e.g., ribonucleic acid particle, e.g., ribonucleic acid nanoparticle) populations may be together in one container, comprising a mixed population of individual nucleic acid particle (e.g., ribonucleic acid particle, e.g., ribonucleic acid nanoparticle) formulations.

[0653] Alternatively, it is possible that different nucleic acid species (e.g., polyribonucleotide species) are formulated together as a “combined particulate formulation.” Such formulations are obtainable by providing a combined formulation (typically combined solution) of different nucleic acid species (e.g., polyribonucleotide species) species together with a particle-forming agent, thereby allowing the formation of particles. As opposed to a “mixed particulate formulation,” a “combined particulate formulation” will typically comprise particles that comprise more than one nucleic acid species (e.g., polyribonucleotide species) species. In a combined particulate composition different nucleic acid species (e.g., polyribonucleotide species) are typically present together in a single particle.

[0654] In certain embodiments, nucleic acids (e.g., polyribonucleotides), when present in provided nucleic acid particles (e.g., ribonucleic acid particles, e.g., lipid nanoparticles) are resistant in aqueous solution to degradation with a nuclease.

[0655] In some embodiments, nucleic acid particles (e.g., ribonucleic acid particles) are lipid nanoparticles. In some embodiments, lipid nanoparticles are liver-targeting lipid nanoparticles. In some embodiments, lipid nanoparticles are cationic lipid nanoparticles comprising one or more cationic lipids (e.g., ones described herein). In some embodiments, cationic lipid nanoparticles may comprise at least one cationic lipid, at least one polymer-conjugated lipid, and at least one helper lipid (e.g., at least one neutral lipid).

### 1. Cationic Polymeric Materials

[0656] Cationic polymers have been recognized as useful for developing such delivery vehicles, as reported in PCT App. Pub. No. WO 2021/001417, the entirety of which is incorporated herein by reference. As used herein, the term “polymer” refers to a composition comprising one or more molecules that comprise repeating units of one or more monomers. As used herein, “polymer,” “polymeric material,” and “polymer composition” are used interchangeably, and unless otherwise specified, refer to a composition of polymer molecules. A person of skill in the art will appreciate that a polymer composition comprises polymer molecules having molecules of different lengths (e.g., comprising varying amounts of monomers). Polymer compositions described herein are characterized by one or more of a normalized molecular weight (Mn), a weight average molecular weight (Mw), and/or a polydispersity index (PDI). In some embodiments, such repeat units can all be identical (a “homopolymer”); alternatively, in some cases, there can be more than one type of repeat unit present within the polymeric material (a “heteropolymer” or a “copolymer”). In some cases, a polymer is biologically derived, e.g., a biopolymer such as a protein. In some cases, additional moieties can also be present in the polymeric material, for example targeting moieties such as those described herein.

[0657] In some embodiments, a polymer utilized in accordance with the present disclosure may be a copolymer. Repeat units forming the copolymer can be arranged in any fashion. For example, in some embodiments, repeat units can be arranged in a random order; alternatively or additionally, in some embodiments, repeat units may be arranged in an alternating order, or as a “block” copolymer, e.g., comprising one or more regions each comprising a first repeat unit (e.g., a first block), and one or more regions each comprising a second repeat unit (e.g., a second block), etc. Block copolymers can have two (a diblock copolymer), three (a triblock copolymer), or more numbers of distinct blocks.

[0658] In certain embodiments, a polymeric material for use in accordance with the present disclosure is biocompatible. In certain embodiments, a biocompatible material is biodegradable, e.g., is able to degrade, chemically and/or biologically, within a physiological environment, such as within the body.

[0659] In certain embodiments, a polymeric material may be or comprise protamine or polyalkyleneimine.

[0660] As those skilled in the art are aware term “protamine” is often used to refer to any of various strongly basic proteins of relatively low molecular weight that are rich in arginine and are found associated especially with DNA in place of somatic histones in the sperm cells of various animals (as fish). In particular, the term “protamine” is often used to refer to proteins found in fish sperm that are strongly basic, are soluble in water, are not coagulated by heat, and yield chiefly arginine upon hydrolysis. In purified form, they are used in a long-acting formulation of insulin and to neutralize the anticoagulant effects of heparin.

[0661] In some embodiments, the term “protamine” as used herein is refers to a protamine amino acid sequence obtained or derived from natural or biological sources, including fragments thereof and/or multimeric forms of said amino acid sequence or fragment thereof, as well as (synthesized) polypeptides which are artificial and specifically designed for specific purposes and cannot be isolated from native or biological sources.

[0662] In some embodiments, a polyalkyleneimine comprises polyethylenimine (PEI) and/or polypropylenimine. In some embodiments, a preferred polyalkyleneimine is polyethyleneimine (PEI). In some embodiments, the average molecular weight of PEI is preferably 0.75·102 to 107 Da, preferably 1000 to 105 Da, more preferably 10000 to 40000 Da, more preferably 15000 to 30000 Da, even more preferably 20000 to 25000 Da.

[0663] Cationic materials (e.g., polymeric materials, including polycationic polymers) contemplated for use herein include those which are able to electrostatically bind nucleic acid. In some embodiments, cationic polymeric materials contemplated for use herein include any cationic polymeric materials with which nucleic acid can be associated, e.g., by forming complexes with the nucleic acid or forming vesicles in which the nucleic acid is enclosed or encapsulated.

[0664] In some embodiments, particles described herein may comprise polymers other than cationic polymers, e.g., non-cationic polymeric materials and/or anionic polymeric materials. Collectively, anionic and neutral polymeric materials are referred to herein as non-cationic polymeric materials.

### 2. Lipid Particles

[0665] The terms “lipid” and “lipid-like material” are used herein to refer to molecules that comprise one or more hydrophobic moieties or groups and optionally also one or more hydrophilic moieties or groups. Molecules comprising hydrophobic moieties and hydrophilic moieties are also frequently denoted as amphiphiles. Lipids are usually poorly soluble in water. In an aqueous environment, the amphiphilic nature allows the molecules to self-assemble into organized structures and different phases. One of those phases consists of lipid bilayers, as they are present in vesicles, multilamellar/unilamellar liposomes, or membranes in an aqueous environment. Hydrophobicity can be conferred by the inclusion of apolar groups that include, but are not limited to, long-chain saturated and unsaturated aliphatic hydrocarbon groups and such groups substituted by one or more aromatic, cycloaliphatic, or heterocyclic group(s). In some embodiments, hydrophilic groups may comprise polar and/or charged groups and include carbohydrates, phosphate, carboxylic, sulfate, amino, sulfhydryl, nitro, hydroxyl, and other like groups.

[0666] Lipid nanoparticles (also referred to as “lipid nanoparticles”) of the present disclosure comprise (i) a cationic lipid; (ii) a polymer-conjugated lipid, and (iii) one or more helper lipids. Lipid nanoparticles described herein are useful for the delivery of nucleic acid cargo (e.g., a polyribonucleotide) into the cell of a subject. In some embodiments, lipid nanoparticles comprising a nucleic acid (e.g., a polyribonucleotide) described herein are useful for causing increased expression of a protein (e.g., an antibody agent) in a subject. In some embodiments, lipid nanoparticles comprising a nucleic acid (e.g., a polyribonucleotide) described herein are useful for causing a pharmacological effect induced by expression of a protein in a subject. Lipid nanoparticles described herein are characterized by molar percentage (mol %) of components in the lipid nanoparticle. A mol % used in reference to a lipid component of a lipid nanoparticle is relative to the total other lipid components in the lipid nanoparticle.

a. Cationic Lipids

[0667] As described herein, lipid nanoparticles of the present disclosure comprise a cationic lipid. In some embodiments, a lipid nanoparticle for delivery of at least one polyribonucleotide described herein comprises a cationic lipid. A cationic lipid, as described herein, is a lipid that is positively charged or is ionizable, such that the cationic lipid will become positively charged when subjected to particular physiological conditions, e.g., a pH of about 7.4 or less, and can promote lipid aggregation. In some embodiments, a cationic lipid is a lipid comprising one or more amine groups which bear or are capable of bearing a positive charge.

[0668] In some embodiments, a cationic lipid may comprise a cationic, meaning positively charged, headgroup. In some embodiments, a cationic lipid may have a hydrophobic domain (e.g., one or more domains of a neutral lipid or an anionic lipid) provided that the cationic lipid has a net positive charge. In some embodiments, a cationic lipid comprises a polar headgroup, which in some embodiments may comprise one or more amine derivatives such as primary, secondary, and/or tertiary amines, quaternary ammonium, various combinations of amines, amidinium salts, or guanidine and/or imidazole groups as well as pyridinium, piperizine and amino acid headgroups such as lysine, arginine, ornithine and/or tryptophan. In some embodiments, a polar headgroup of a cationic lipid comprises one or more amine derivatives. In some embodiments, a polar headgroup of a cationic lipid comprises a quaternary ammonium. In some embodiments, a headgroup of a cationic lipid may comprise multiple cationic charges. In some embodiments, a headgroup of a cationic lipid comprises one cationic charge.

[0669] In some embodiments, a cationic lipid is selected from 1,2-dimyristoyl-sn-glycero-3-ethylphosphocholine (DMEPC); 2-dimyristoyl-3-trimethylammonium propane (DMTAP); dioleyl ether phosphatidylcholine (DOEPC); N,N-dioleyl-N,N-dimethylammonium chloride (DODAC); N-(2,3-dioleyloxy)propyl)-N,N,N-trimethylammonium chloride (DOTMA); N,N-distearyl-N,N-dimethylammonium bromide (DDAB); N-(2,3dioleoyloxy)propyl)-N,N,N-trimethylammonium chloride (DOTAP); 3-(N—(N′,N′dimethylaminoethane)-carbamoyl)cholesterol (DC-Chol), N-(1-(2,3-dioleoyloxy)propyl)N-2-(sperminecarboxamido)ethyl)-N,N-dimethylammonium trifluoracetate (DOSPA), dioctadecylamidoglycyl carboxyspermine (DOGS), 1,2-dioleoyl-3-dimethylammonium propane (DODAP), N,N-dimethyl-2,3-dioleoyloxy)propylamine (DODMA), and N-(1,2-dimyristyloxyprop-3-yl)-N,N-dimethyl-N-hydroxyethyl ammonium bromide (DMRIE).

[0670] In some embodiments, a cationic lipid is one provided in WO2012/016184, which is incorporated herein by reference in its entirety. For example, in some embodiments, a cationic lipid is selected from 1,2-dilinoleyoxy-3-(dimethylamino) acetoxypropane (DLin-DAC), 1,2-dilinoleyoxy-3morpholinopropane (DLin-MA), 1,2-dilinoleoyl-3-dimethylaminopropane (DLinDAP), 1,2-dilinoleylthio-3-dimethylaminopropane (DLin-S-DMA), 1-linoleoyl-2-linoleyloxy-3dimethylaminopropane (DLin-2-DMAP), 1,2-dilinoleyloxy-3-trimethylaminopropane chloride salt (DLin-TMA.CI), 1,2-dilinoleoyl-3-trimethylaminopropane chloride salt (DLin-TAP.CI), 1,2-dilinoleyloxy-3-(N-methylpiperazino) propane (DLin-MPZ), 3-(N,Ndilinoleylamino)-1,2-propanediol (DLinAP), 3-(N,N-dioleylamino)-1,2-propanediol (DOAP), 1,2-dilinoleyloxo-3-(2-N,N-dimethylamino) ethoxypropane (DLin-EG-DMA), and 2,2-dilinoleyl-4-dimethylaminomethyl-[1,3]-dioxolane (DLin-K-DMA).

[0671] In some embodiments, a cationic lipid is one provided in WO2020/219941, WO2017/075531, WO2016/176330, WO2017/049245, or U.S. Pat. No. 9,670,152, each of which is incorporated herein by reference in its entirety.

[0672] In some embodiments, a cationic lipid is a compound of Formula I:

[chemical structure]

or a pharmaceutically acceptable salt thereof, wherein:
one of L¹ or L² is —OC(O)—, —C(O)O—, —C(O)—, —O—, —S(O)ₓ—, —S—S—, —C(O)S—, SC(O)—, —NR^{a}C(O)—, —C(O)NR^{a}—, —NR^{a}C(O)NR^{a}—, —OC(O)NR^{a}— or —NR^{a}C(O)O—, and the other of L¹ or L² is —OC(O)—, —C(O)O—, —C(O)—, —O—, —S(O)ₓ—, —S—S—, —C(O)S—, SC(O)—, —NR^{a}C(O)—, —C(O)NR^{a}—, —NR^{a}C(O)NR^{a}—, —OC(O)NR^{a}—, —NR^{a}C(O)O—, or a direct bond;
[0673] G¹ and G² are each independently unsubstituted C₁-C₁₂ alkylene or C₁-C₁₂ alkenylene;
[0674] G³ is C₁-C₂₄ alkylene, C₁-C₂₄ alkenylene, C₃-C₈ cycloalkylene, C₃-C₈ cycloalkenylene;
[0675] R^{a} is H or C₁-C₁₂ alkyl;
[0676] R¹ and R² are each independently C₆-C₂₄ alkyl or C₆-C₂₄ alkenyl;
[0677] R³ is H, OR⁵, CN, —C(O)OR⁴, —OC(O)R⁴ or —R⁵C(O)R⁴;
[0678] R⁴ is C₁-C₁₂ alkyl;
[0679] R⁵ is H or C₁-C₆ alkyl; and
[0680] x is 0, 1 or 2.

[0681] In some embodiments, one of L¹ or L² is —OC(O)— or —C(O)O—. In some embodiments, each of L¹ and L² is —OC(O)— or —C(O)O—.

[0682] In some embodiments, G¹ is C₁-C₁₂ alkylene. In some embodiments, G² is C₁-C₁₂ alkylene. In some embodiments G¹ and G² are each independently C₁-C₁₂ alkylene. In some embodiments G¹ and G² are each independently C₅-C₁₂ alkylene.

[0683] In some embodiments, G³ is C₁-C₂₄ alkylene. In some embodiments, G³ is C₁-C₆ alkylene.

[0684] In some embodiments, R¹ and R² are each independently selected from:

[chemical structure]

[0685] In some embodiments, R³ is OH.

[0686] In some embodiments, each of L¹ and L² is —OC(O)—, G¹ and G² are each independently C₅-C₁₂ alkylene, G³ is C₁-C₆ alkylene, R³ is OH, and R¹ and R² are each independently selected from:

[chemical structure]

[0687] In some embodiments, a cationic lipid is a compound of Formula Ia or Ib

[chemical structure]

or a pharmaceutically acceptable salt thereof, where n is an integer from 1 to 15, A is C3-C8 cycloaliphatic, each R6 is independently selected from H, OH, and C1-C24 aliphatic, and wherein R1, R2, R3, L1, L2, G1, and G2 are as described in classes and subclasses herein, both singly and in combination.

[0688] In some embodiments, a positively charged lipid structure described herein may also include one or more other components that may be typically used in the formation of vesicles (e.g. for stabilization). Examples of such other components includes, without being limited thereto, fatty alcohols, fatty acids, and/or cholesterol esters or any other pharmaceutically acceptable excipients which may affect the surface charge, the membrane fluidity and assist in the incorporation of the lipid into the lipid assembly. Examples of sterols include cholesterol, cholesteryl hemisuccinate, cholesteryl sulfate, or any other derivatives of cholesterol. Preferably, the at least one cationic lipid comprises DMEPC and/or DOTMA.

[0689] In some embodiments, a cationic lipid is ionizable such that it can exist in a positively charged form or neutral form depending on pH. Such ionization of a cationic lipid can affect the surface charge of the lipid particle under different pH conditions, which in some embodiments may influence plasma protein absorption, blood clearance, and/or tissue distribution as well as the ability to form endosomolytic non-bilayer structures. Accordingly, in some embodiments, a cationic lipid may be or comprise a pH responsive lipid. In some embodiments a pH responsive lipid is a fatty acid derivative or other amphiphilic compound which is capable of forming a lyotropic lipid phase, and which has a pKa value between pH 5 and pH 7.5. This means that the lipid is uncharged at a pH above the pKa value and positively charged below the pKa value. In some embodiments, a pH responsive lipid may be used in addition to or instead of a cationic lipid for example by binding one or more polyribonucleotides to a lipid or lipid mixture at low pH. pH responsive lipids include, but are not limited to, 1,2-dioieyioxy-3-dimethylamino-propane (DODMA).

[0690] In some embodiments, a lipid nanoparticle may comprise one or more cationic lipids as described in WO 2017/075531 (e.g., as presented in Tables 1 and 3 therein) and WO 2018/081480 (e.g., as presented in Tables 1-4 therein), the entire contents of each of which are incorporated herein by reference for the purposes described herein.

[0691] In some embodiments, a cationic lipid that may be useful in accordance with the present disclosure is an amino lipid comprising a titratable tertiary amino head group linked via ester bonds to at least two saturated alkyl chains, which ester bonds can be hydrolyzed easily to facilitate fast degradation and/or excretion via renal pathways. In some embodiments, such an amino lipid has an apparent pKₐ of about 6.0-6.5 (e.g., in one embodiment with an apparent pKₐ of approximately 6.25), resulting in an essentially fully positively charged molecule at an acidic pH (e.g., pH 5). In some embodiments, such an amino lipid, when incorporated in lipid nanoparticle, can confer distinct physicochemical properties that regulate particle formation, cellular uptake, fusogenicity and/or endosomal release of polyribonucleotide(s). In some embodiments, introduction of an aqueous RNA solution to a lipid mixture comprising such an amino lipid at pH 4.0 can lead to an electrostatic interaction between the negatively charged RNA backbone and the positively charged cationic lipid. Without wishing to be bound by any particular theory, such electrostatic interaction leads to particle formation coincident with efficient encapsulation of RNA drug substance. After RNA encapsulation, adjustment of the pH of the medium surrounding the resulting lipid nanoparticle to a more neutral pH (e.g., pH 7.4) results in neutralization of the surface charge of the lipid nanoparticle. When all other variables are held constant, such charge-neutral particles display longer in vivo circulation lifetimes and better delivery to hepatocytes compared to charged particles, which are rapidly cleared by the reticuloendothelial system. Upon endosomal uptake, the low pH of the endosome renders lipid nanoparticle comprising such an amino lipid fusogenic and allows the release of the RNA into the cytosol of the target cell.

[0692] In some embodiments, a cationic lipid that may be useful in accordance with the present disclosure has one of the structures set forth in Table 8 below:

TABLE 8
Exemplary cationic lipids

| No. | Structure |
|---|---|
| I-1 | [chemical structure] |
| I-2 | [chemical structure] |
| I-3 | [chemical structure] |
| I-4 | [chemical structure] |
| I-5 | [chemical structure] |
| I-6 | [chemical structure] |
| I-7 | [chemical structure] |
| I-8 | [chemical structure] |
| I-9 | [chemical structure] |
| I-10 | [chemical structure] |
| I-11 | [chemical structure] |
| I-12 | [chemical structure] |
| I-13 | [chemical structure] |
| I-14 | [chemical structure] |
| I-15 | [chemical structure] |
| I-16 | [chemical structure] |
| I-17 | [chemical structure] |
| I-18 | [chemical structure] |
| I-19 | [chemical structure] |
| I-20 | [chemical structure] |
| I-21 | [chemical structure] |
| I-22 | [chemical structure] |
| I-23 | [chemical structure] |
| I-24 | [chemical structure] |
| I-25 | [chemical structure] |
| I-26 | [chemical structure] |
| I-27 | [chemical structure] |
| I-28 | [chemical structure] |
| I-29 | [chemical structure] |
| I-30 | [chemical structure] |
| I-31 | [chemical structure] |
| I-32 | [chemical structure] |
| I-33 | [chemical structure] |
| I-34 | [chemical structure] |
| I-35 | [chemical structure] |
| I-36 | [chemical structure] |
| I-37 | [chemical structure] |
| I-38 | [chemical structure] |
| I-39 | [chemical structure] |
| I-40 | [chemical structure] |
| I-41 | [chemical structure] |
| I-42 | [chemical structure] |
| I-43 | [chemical structure] |
| I-44 | [chemical structure] |
| I-45 | [chemical structure] |
| I-46 | [chemical structure] |
| I-47 | [chemical structure] |
| I-48 | [chemical structure] |
| I-49 | [chemical structure] |

or a pharmaceutically acceptable salt thereof. In some embodiments, provided compounds are provided and/or utilized in a salt form (e.g., a pharmaceutically acceptable salt form). Reference to a compound provided herein is understood to include reference to salts thereof, unless otherwise indicated.

[0693] In certain embodiments, a cationic lipid that may be useful in accordance with the present disclosure is or comprises ((3-hydroxypropyl)azanediyl)bis(nonane-9,1-diyl) bis(2-butyloctanoate) with a chemical structure in Table 8 above as I-45.

[0694] In some embodiments, a cationic lipid is selected from DODAC, DOTMA, DDAB, DOTAP, DC-Chol, DMRIE, I-3, I-45, and combinations thereof.

[0695] In some embodiments, a cationic lipid is I-3. In some embodiments, a cationic lipid is I-45. In some embodiments, a cationic lipid is SM-102. In some embodiments, a cationic lipid is DODAC. In some embodiments, a cationic lipid is DOTMA. In some embodiments, a cationic lipid is DDAB. In some embodiments, a cationic lipid is DOTAP. In some embodiments, a cationic lipid is DC-Chol.

[0696] In some embodiments, lipid nanoparticles of the present disclosure comprise about 30 to about 70 mol % of a cationic lipid. In some embodiments, an lipid nanoparticle comprises about 35 to about 65 mol % of a cationic lipid. In some embodiments, an lipid nanoparticle comprises about 40 to about 60 mol % of a cationic lipid. In some embodiments, an lipid nanoparticle comprises about 41 to about 49 mol % of a cationic lipid. In some embodiments, an lipid nanoparticle comprises about 48 mol % of a cationic lipid. In some embodiments, an lipid nanoparticle comprises about 50 mol % of a cationic lipid.

[0697] Cationic lipids may be used alone or in combination with neutral lipids, e.g., cholesterol and/or neutral phospholipids, or in combination with other known lipid assembly components.

b. Helper Lipids

[0698] As described herein, lipid nanoparticles of the present disclosure comprise one or more helper lipids. In some embodiments, a lipid nanoparticle for delivery of at least one polyribonucleotide described herein comprises one or more helper lipids. A helper lipid may be a neutral lipid, a positively charged lipid, or a negatively charged lipid. In some embodiments, a helper lipid is a lipid that are useful for increasing the effectiveness of delivery of lipid-based particles such as cationic lipid-based particles to a target cell. In some embodiments, a helper lipid may be or comprise a structural lipid with its concentration chosen to optimize lipid nanoparticle particle size, stability, and/or encapsulation.

[0699] In some embodiments, a lipid nanoparticle for delivery of polyribonucleotide(s) described herein comprises a neutral helper lipid. Examples of such neutral helper lipids include, but are not limited to phosphotidylcholines such as 1,2-distearoyl-sn-glycero-3-phosphocholine (DSPC), 1,2-Dipalmitoyl-sn-glycero-3-phosphocholine (DPPC), 1,2-Dimyristoyl-sn-glycero-3-phosphocholine (DMPC), 1-palmitoyl-2-oleoyl-sn-glycero-3-phosphocholine (POPC), 1,2-dioleoyl-sn-glycero-3-phosphocholine (DOPC), phophatidylethanolamines such as 1,2-dioleoyl-sn-glycero-3-phosphoethanolamine (DOPE), sphingomyelins (SM), ceramides, cholesterol, steroids such as sterols and their derivatives. In some embodiments, a steroid is a sterol. In some embodiments, a sterol is cholesterol.

[0700] Neutral lipids may be synthetic or naturally derived. Other neutral helper lipids that are known in the art, e.g., as described in WO 2017/075531 and WO 2018/081480, the entire contents of each of which are incorporated herein by reference for the purposes described herein, can also be used in lipid nanoparticles described herein. In some embodiments, a lipid nanoparticle for delivery of polyribonucleotide(s) described herein comprises DSPC and/or cholesterol.

[0701] In some embodiments, a lipid nanoparticle described herein comprises multiple neutral lipids (e.g., two neutral lipids). It is understood that reference to “a” neutral lipid is intended to refer to lipid nanoparticles that comprise one or more neutral lipids. In some embodiments, a lipid nanoparticle described herein comprises a phospholipid and/or a steroid. In some embodiments, a lipid nanoparticle described herein comprises DSPC and/or cholesterol.

[0702] In some embodiments, a lipid nanoparticle comprises about 5 to about 15 mol % of a phospholipid. In some embodiments, a lipid nanoparticle comprises about 8 to about 12 mol % of a phospholipid. In some embodiments, a lipid nanoparticle comprises about 10 mol % of a phospholipid. In some embodiments, a lipid nanoparticle comprises about 5 to about 15 mol % of DSPC. In some embodiments, a lipid nanoparticle comprises about 8 to about 12 mol % of DSPC. In some embodiments, a lipid nanoparticle comprises about 10 mol % of DSPC.

[0703] In some embodiments, a lipid nanoparticle comprises about 30 to about 50 mol % of a steroid. In some embodiments, a lipid nanoparticle comprises about 35 to about 45 mol % of a steroid. In some embodiments, a lipid nanoparticle comprises about 38 to about 40 mol % of a steroid. In some embodiments, a lipid nanoparticle comprises about 38.5 mol % of a steroid. In some embodiments, a lipid nanoparticle comprises about 40 mol % of a steroid.

[0704] In some embodiments, a lipid nanoparticle comprises about 30 to about 50 mol % of cholesterol. In some embodiments, a lipid nanoparticle comprises about 35 to about 45 mol % of cholesterol. In some embodiments, a lipid nanoparticle comprises about 38 to about 41 mol % of cholesterol. In some embodiments, a lipid nanoparticle comprises about 38.5 mol % of cholesterol. In some embodiments, a lipid nanoparticle comprises about 40.7 mol % of cholesterol.

[0705] In some embodiments, a lipid nanoparticle comprises about 5 to about 15 mol % of phospholipid and about 30 to about 50 mol % of steroid.

[0706] In some embodiments, a lipid nanoparticle for delivery of at least one polyribonucleotide described herein comprises at least two helper lipids (e.g., ones described herein). In some such embodiments, a lipid nanoparticle for delivery of at least one polyribonucleotide described herein comprises DSPC and cholesterol.

### C. Polymer-Conjugated Lipids

[0707] As described herein, lipid nanoparticles of the present disclosure comprise a polymer-conjugated lipid. In some embodiments, a lipid nanoparticle for delivery of at least one polyribonucleotide described herein comprises a polymer-conjugated lipid. A polymer-conjugated lipid is typically a molecule comprising a lipid portion and a polymer portion conjugated thereto.

[0708] In some embodiments, a polymer-conjugated lipid is a PEG-conjugated lipid. In some embodiments, a PEG-conjugated lipid is designed to sterically stabilize a lipid particle by forming a protective hydrophilic layer that shields the hydrophobic lipid layer. In some embodiments, a PEG-conjugated lipid can reduce its association with serum proteins and/or the resulting uptake by the reticuloendothelial system when such lipid particles are administered in vivo.

[0709] In some embodiments, a PEG lipid is selected from pegylated diacylglycerol (PEG-DAG) such as I-(monomethoxy-polyethyleneglycol)-2,3-dimyristoylglycerol (PEG-DMG) (e.g., 1,2-dimyristoyl-rac-glycero-3-methoxypolyethylene glycol-2000 (PEG2000-DMG)), a pegylated phosphatidylethanoloamine (PEG-PE), a PEG succinate diacylglycerol (PEG-S-DAG) such as 4-O-(2′,3′-di(tetradecanoyloxy)propyl-1-O-(ω-methoxy(polyethoxy)ethyl)butanedioate (PEG-S-DMG), a pegylated ceramide (PEG-cer), or a PEG dialkoxypropylcarbamate such as ω-m ethoxy (polyethoxy)ethyl-N-(2,3-di(tetradecanoxy)propyl)carbamate, and 2,3-di(tetradecanoxy)propy 1-N-(ω methoxy(polyethoxy)ethyl)carbamate.

[0710] Certain PEG-conjugated lipids (also known as PEGylated lipids) were clinically approved with safety demonstrated in clinical trials. PEG-conjugated lipids are known to affect cellular uptake, a prerequisite to endosomal localization and payload delivery. The present disclosure, among other things, provides an insight that the pharmacology of encapsulated nucleic acid can be controlled in a predictable manner by modulating the alkyl chain length of a PEG-lipid anchor. In some embodiments, the present disclosure, among other things, provides an insight that such PEG-conjugated lipids may be selected for an polyribonucleotide/lipid nanoparticle drug product formulation to provide optimum delivery of polyribonucleotides to the liver. In some embodiments, such PEG-conjugated lipids may be designed and/or selected based on reasonable solubility characteristics and/or its molecular weight to effectively perform the function of a steric barrier. For example, in some embodiments, such a PEGylated lipid does not show appreciable surfactant or permeability enhancing or disturbing effects on biological membranes. In some embodiments, PEG in such a PEG-conjugated lipid can be linked to diacyl lipid anchors with a biodegradable amide bond, thereby facilitating fast degradation and/or excretion. In some embodiments, a lipid nanoparticle comprising a PEG-conjugated lipid retain a full complement of a PEGylated lipid. In the blood compartment, such a PEGylated lipid dissociates from the particle over time, revealing a more fusogenic particle that is more readily taken up by cells, ultimately leading to release of the RNA payload.

[0711] In some embodiments, a PEG-lipid is PEG2000-DMG:

[chemical structure]

[0712] In some embodiments, a lipid nanoparticle may comprise one or more PEG-conjugated lipids or pegylated lipids as described in WO 2017/075531 and WO 2018/081480, the entire contents of each of which are incorporated herein by reference for the purposes described herein. For example, in some embodiments, a PEG-conjugated lipid that may be useful in accordance with the present disclosure can have a structure

[chemical structure]

as described in WO 2017/075531, or a pharmaceutically acceptable salt, tautomer or stereoisomer thereof, wherein: R₈ and R₉ are each independently a straight or branched, saturated or unsaturated alkyl chain containing from 10 to 30 carbon atoms, wherein the alkyl chain is optionally interrupted by one or more ester bonds; and w has a mean value ranging from 30 to 60. In some embodiments, R8 and R9 are each independently straight, saturated alkyl chains containing from 12 to 16 carbon atoms. In some embodiments, w has a mean value ranging from 43 to 53. In some embodiments, w is an integer from 40 to 50. In some embodiments, w is 45 to 47. In other embodiments, the average w is about 45. In some embodiments, a PEG-conjugated lipid is or comprises 2-[(Polyethylene glycol)-2000]-N, N-ditetradecylacetamide with a chemical structure as shown as I-3 in Table 8 above and below:

[chemical structure]

or a pharmaceutically acceptable salt thereof, where n′ is an integer from 45 to 50.

[0713] In some embodiments, a PEG-lipid is selected from PEG-DAG, PEG-PE, PEG-S-DAG, PEG2000-DMG, PEG-cer, a PEG dialkyoxypropylcarbamate, ALC-0159, and combinations thereof. In some embodiments, a PEG-lipid is ALC-0159 or PEG2000-DMG. In some embodiments, a PEG-lipid is ALC-0159. In some embodiments, a PEG-lipid is PEG2000-DMG. In some embodiments, a PEG-lipid is PEG-DAG. In some embodiments, a PEG-lipid is PEG-PE. In some embodiments, a PEG-lipid is PEG-S-DAG. In some embodiments, a PEG-lipid is PEG-cer. In some embodiments, a PEG-lipid is a PEG dialkyoxypropylcarbamate.

[0714] In some embodiments, a PEG group that is part of a PEG-lipid has, on average in a composition comprising one or more PEG-lipid molecules, a number average molecular weight (Mₙ) of about 2000 g/mol.

[0715] In some embodiments, a PEG-lipid is about 0.5 to about 5 mol % relative to total lipids in the lipid nanoparticle. In some embodiments, a lipid nanoparticle comprises about 1.0 to about 2.5 mol % of a PEG-lipid. In some embodiments, a lipid nanoparticle comprises about 1.5 to about 2.0 mol % of a PEG-lipid. In some embodiments, a lipid nanoparticle comprises about 1.5 to about 1.8 mol % of a PEG-lipid.

[0716] In some embodiments, a molar ratio of total cationic lipid to total polymer-conjugated lipid (e.g., PEG-conjugated lipid) is from about 100:1 to about 20:1. In some embodiments, a molar ratio of total cationic lipid to total polymer-conjugated lipid (e.g., PEG-conjugated lipid) is from about 50:1 to about 20:1. In some embodiments, a molar ratio of total cationic lipid to total polymer-conjugated lipid (e.g., PEG-conjugated lipid) is from about 40:1 to about 20:1. In some embodiments, a molar ratio of total cationic lipid to total polymer-conjugated lipid (e.g., PEG-conjugated lipid) is from about 35:1 to about 25:1.

[0717] In some embodiments, an lipid nanoparticle comprises i) about 30 to about 50 mol % of the cationic lipid; ii) about 1 to about 5 mol % of a PEG-lipid; iii) about 5 to about 15 mol % of a neutral lipid; and iv) about 30 to about 50 mol % of a steroid. In some embodiments, an lipid nanoparticle comprises: i) about 30% to about 50% by weight of ALC-0315; ii) about 1% to about 5% by weight of a ALC-0159; iii) about 5% to about 15% by weight of DSPC; and iv) about 30 to about 50 mol % of cholesterol.

[0718] In some embodiments, an lipid nanoparticle comprises: i) about 47.5 mol % of ALC-0315; ii) about 1.8 mol % of a ALC-0159; iii) about 10 mol % of DSPC; and iv) about 40.7 mol % of cholesterol.

[0719] In some embodiments, an lipid nanoparticle comprises: i) about 30 to about 50 mol % of SM-102; ii) about 1 to about 5 mol % of a PEG2000-DMG; iii) about 5 to about 15 mol % of DSPC; and iv) about 30 to about 50 mol % of a steroid. In some embodiments, an lipid nanoparticle comprises i) about 50 mol % of SM-102; ii) about 1.5 mol % of PEG2000-DMG; iii) about 10 mol % of DSPC; and iv) about 38.5 mol % of cholesterol.

### 3. Exemplary Lipid Nanoparticle Compositions

[0720] In some embodiments, lipids that form lipid nanoparticles described herein comprise: a polymer-conjugated lipid; a cationic lipid; and at least one helper lipid. In some such embodiments, total polymer-conjugated lipid may be present in about 0.5-5 mol %, about 0.7-3.5 mol %, about 1-2.5 mol %, about 1.5-2 mol %, or about 1.5-1.8 mol % of the total lipids. In some embodiments, total polymer-conjugated lipid may be present in about 1-2.5 mol % of the total lipids. In some embodiments, the molar ratio of total cationic lipid to total polymer-conjugated lipid (e.g., PEG-conjugated lipid) may be about 100:1 to about 20:1, or about 50:1 to about 20:1, or about 40:1 to about 20:1, or about 35:1 to about 25:1. In some embodiments, the molar ratio of total cationic lipid to total polymer-conjugated lipid may be about 35:1 to about 25:1.

[0721] In some embodiments involving a polymer-conjugated lipid, a cationic lipid, and a helper neutral lipid in lipid nanoparticles described herein, total cationic lipid is present in about 35-65 mol %, about 40-60 mol %, about 41-49 mol %, about 41-48 mol %, about 42-48 mol %, about 43-48 mol %, about 44-48 mol %, about 45-48 mol %, about 46-48 mol %, or about 47.2-47.8 mol % of the total lipids. In certain embodiments, total cationic lipid is present in about 47.0, 47.1, 47.2, 47.3, 47.4, 47.5, 47.6, 47.7, 47.8, 47.9 or 48.0 mol % of the total lipids.

[0722] In some embodiments involving a polymer-conjugated lipid, a cationic lipid, and a helper neutral lipid in lipid nanoparticles described herein, total neutral lipid is present in about 35-65 mol %, about 40-60 mol %, about 45-55 mol %, or about 47-52 mol % of the total lipids. In some embodiments, total neutral lipid is present in 35-65 mol % of the total lipids. In some embodiments, total non-steroid neutral lipid (e.g., DPSC) is present in about 5-15 mol %, about 7-13 mol %, or 9-11 mol % of the total lipids. In some embodiments, total non-steroid neutral lipid is present in about 9.5, 10 or 10.5 mol % of the total lipids. In some embodiments, the molar ratio of the total cationic lipid to the non-steroid neutral lipid ranges from about 4.1:1.0 to about 4.9:1.0, from about 4.5:1.0 to about 4.8:1.0, or from about 4.7:1.0 to 4.8:1.0. In some embodiments, total steroid neutral lipid (e.g., cholesterol) is present in about 35-50 mol %, about 39-49 mol %, about 40-46 mol %, about 40-44 mol %, or about 40-42 mol % of the total lipids. In certain embodiments, total steroid neutral lipid (e.g., cholesterol) is present in about 39, 40, 41, 42, 43, 44, 45, or 46 mol % of the total lipids. In certain embodiments, the molar ratio of total cationic lipid to total steroid neutral lipid is about 1.5:1 to 1:1.2, or about 1.2:1 to 1:1.2.

[0723] In some embodiments, a lipid composition comprising a cationic lipid, a polymer-conjugated lipid, and a neutral lipid can have individual lipids present in certain molar percents of the total lipids, or in certain molar ratios (relative to each other) as described in WO 2018/081480, the entire contents of each of which are incorporated herein by reference for the purposes described herein.

[0724] In some embodiments, lipids that form the lipid nanoparticles comprise: a polymer-conjugated lipid (e.g., PEG-conjugated lipid); a cationic lipid; and a neutral lipid, wherein the polymer-conjugated lipid is present in about 1-2.5 mol % of the total lipids; the cationic lipid is present in 35-65 mol % of the total lipids; and the neutral lipid is present in 35-65 mol % of the total lipids. In some embodiments, lipids that form the lipid nanoparticles comprise: a polymer-conjugated lipid (e.g., PEG-conjugated lipid); a cationic lipid; and a neutral lipid, wherein the polymer-conjugated lipid is present in about 1-2 mol % of the total lipids; the cationic lipid is present in 45-48.5 mol % of the total lipids; and the neutral lipid is present in 45-55 mol % of the total lipids. In some embodiments, lipids that form the lipid nanoparticles comprise: a polymer-conjugated lipid (e.g., PEG-conjugated lipid); a cationic lipid; and a neutral lipid comprising a non-steroid neutral lipid and a steroid neutral lipid, wherein the polymer-conjugated lipid is present in about 1-2 mol % of the total lipids; the cationic lipid is present in 45-48.5 mol % of the total lipids; the non-steroid neutral lipid is present in 9-11 mol % of the total lipids; and the steroid neutral lipid is present in about 36-44 mol % of the total lipids. In many of such embodiments, a PEG-conjugated lipid is or comprises 2-[(polyethylene glycol)-2000]-N, N-ditetradecylacetamide or a derivative thereof. In many of such embodiments, a cationic lid is or comprises ((3-hydroxypropyl)azanediyl)bis(nonane-9,1-diyl) bis(2-butyloctanoate) or a derivative thereof. In many of such embodiments, a neutral lipid comprises DSPC and cholesterol, wherein DSPC is a non-steroid neutral lipid and cholesterol is a steroid neutral lipid.

[0725] In some embodiments, lipids that form the lipid nanoparticles comprise:
[0726] (a) 2-[(polyethylene glycol)-2000]-N,N-ditetradecylacetamide at about 1-2.5 mol % of the total lipids;
[0727] (b) DPSC and cholesterol, wherein together DPSC and cholesterol are about 35-65 mol % of the total lipids; and
[0728] (c) ((3-hydroxypropyl)azanediyl)bis(nonane-9,1-diyl) bis(2-butyloctanoate) at about 35-65 mol % of the total lipids.

### B. Exemplary Methods of Making Lipid Nanoparticles

[0729] Lipids and lipid nanoparticles comprising nucleic acids and their method of preparation are known in the art, including, e.g., as described in U.S. Pat. Nos. 8,569,256, 5,965,542 and U.S. Patent Publication Nos. 2016/0199485, 2016/0009637, 2015/0273068, 2015/0265708, 2015/0203446, 2015/0005363, 2014/0308304, 2014/0200257, 2013/086373, 2013/0338210, 2013/0323269, 2013/0245107, 2013/0195920, 2013/0123338, 2013/0022649, 2013/0017223, 2012/0295832, 2012/0183581, 2012/0172411, 2012/0027803, 2012/0058188, 2011/0311583, 2011/0311582, 2011/0262527, 2011/0216622, 2011/0117125, 2011/0091525, 2011/0076335, 2011/0060032, 2010/0130588, 2007/0042031, 2006/0240093, 2006/0083780, 2006/0008910, 2005/0175682, 2005/017054, 2005/0118253, 2005/0064595, 2004/0142025, 2007/0042031, 1999/009076 and PCT Pub. Nos. WO 99/39741, WO 2018/081480, WO 2017/004143, WO 2017/075531, WO 2015/199952, WO 2014/008334, WO 2013/086373, WO 2013/086322, WO 2013/016058, WO 2013/086373, WO2011/141705, and WO 2001/07548, the full disclosures of which are herein incorporated by reference in their entirety for the purposes described herein.

[0730] For example, in some embodiments, cationic lipids, neutral lipids (e.g., DSPC, and/or cholesterol) and polymer-conjugated lipids can be solubilized in ethanol at a pre-determined molar ratio (e.g., ones described herein). In some embodiments, lipid nanoparticles (lipid nanoparticle) are prepared at a total lipid to polyribonucleotides weight ratio of approximately 10:1 to 30:1. In some embodiments, such polyribonucleotides can be diluted to 0.2 mg/ml in acetate buffer.

[0731] In some embodiments, using an ethanol injection technique, a colloidal lipid dispersion comprising polyribonucleotides can be formed as follows: an ethanol solution comprising lipids, such as cationic lipids, neutral lipids, and polymer-conjugated lipids, is injected into an aqueous solution comprising polyribonucleotides (e.g., ones described herein).

[0732] In some embodiments, lipid and polyribonucleotide solutions can be mixed at room temperature by pumping each solution at controlled flow rates into a mixing unit, for example, using piston pumps. In some embodiments, the flow rates of a lipid solution and a RNA solution into a mixing unit are maintained at a ratio of 1:3. Upon mixing, nucleic acid-lipid particles are formed as the ethanolic lipid solution is diluted with aqueous polyribonucleotides. The lipid solubility is decreased, while cationic lipids bearing a positive charge interact with the negatively charged RNA.

[0733] In some embodiments, a solution comprising RNA-encapsulated lipid nanoparticles can be processed by one or more of concentration adjustment, buffer exchange, formulation, and/or filtration.

[0734] In some embodiments, RNA-encapsulated lipid nanoparticles can be processed through filtration.

[0735] In some embodiments, particle size and/or internal structure of lipid nanoparticles (with or with ssRNs) may be monitored by appropriate techniques such as, e.g., small-angle X-ray scattering (SAXS) and/or transmission electron cryomicroscopy (CryoTEM).

### V. Pharmaceutical Compositions

[0736] The present disclosure provides compositions, e.g., pharmaceutical compositions comprising one or more polyribonucleotides described herein. Pharmaceutical formulations may additionally comprise a pharmaceutically acceptable excipient, which, as used herein, includes any and all solvents, dispersion media, diluents, or other liquid vehicles, dispersion or suspension aids, surface active agents, isotonic agents, thickening or emulsifying agents, preservatives, solid binders, lubricants and the like, as suited to the particular dosage form desired. Remington's The Science and Practice of Pharmacy, 21st Edition, A. R. Gennaro (Lippincott, Williams & Wilkins, Baltimore, MD, 2006; incorporated herein by reference) discloses various excipients used in formulating pharmaceutical compositions and known techniques for the preparation thereof. Except insofar as any conventional excipient medium is incompatible with a substance or its derivatives, such as by producing any undesirable biological effect or otherwise interacting in a deleterious manner with any other component(s) of the pharmaceutical composition, its use is contemplated to be within the scope of this disclosure.

[0737] In some embodiments, an excipient is approved for use in humans and for veterinary use. In some embodiments, an excipient is approved by the United States Food and Drug Administration. In some embodiments, an excipient is pharmaceutical grade. In some embodiments, an excipient meets the standards of the United States Pharmacopoeia (USP), the European Pharmacopoeia (EP), the British Pharmacopoeia, and/or the International Pharmacopoeia.

[0738] Pharmaceutically acceptable excipients used in the manufacture of pharmaceutical compositions include, but are not limited to, inert diluents, dispersing and/or granulating agents, surface active agents and/or emulsifiers, disintegrating agents, binding agents, preservatives, buffering agents, lubricating agents, and/or oils. Such excipients may optionally be included in pharmaceutical formulations. Excipients such as cocoa butter and suppository waxes, coloring agents, coating agents, sweetening, flavoring, and/or perfuming agents can be present in the composition, according to the judgment of the formulator.

[0739] General considerations in the formulation and/or manufacture of pharmaceutical agents may be found, for example, in Remington: The Science and Practice of Pharmacy 21st ed., Lippincott Williams & Wilkins, 2005 (incorporated herein by reference).

[0740] In some embodiments, pharmaceutical compositions provided herein may be formulated with one or more pharmaceutically acceptable carriers or diluents as well as any other known adjuvants and excipients in accordance with conventional techniques such as those disclosed in Remington: The Science and Practice of Pharmacy 21st ed., Lippincott Williams & Wilkins, 2005 (incorporated herein by reference).

[0741] Pharmaceutical compositions described herein can be administered by appropriate methods known in the art. As will be appreciated by a skilled artisan, the route and/or mode of administration may depend on a number of factors, including, e.g., but not limited to stability and/or pharmacokinetics and/or pharmacodynamics of pharmaceutical compositions described herein.

[0742] In some embodiments, pharmaceutical compositions described herein are formulated for parenteral administration, which includes modes of administration other than enteral and topical administration, usually by injection, and includes, without limitation, intravenous, intramuscular, intraarterial, intradermal, subcutaneous, subcuticular, or intraarticular injection and infusion. In preferred embodiments, pharmaceutical compositions described herein are formulated for intravenous, intramuscular, or subcutaneous administration.

[0743] In some embodiments, pharmaceutical compositions described herein are formulated for intravenous administration. In some embodiments, pharmaceutically acceptable excipients that may be useful for intravenous administration include sterile aqueous solutions or dispersions and sterile powders for preparation of sterile injectable solutions or dispersions.

[0744] Therapeutic compositions typically must be sterile and stable under the conditions of manufacture and storage. The composition can be formulated as a solution, microemulsion, lipid nanoparticles, or other ordered structure suitable to high drug concentration. The carrier can be a solvent or dispersion medium containing, for example, water, ethanol, polyol (for example, glycerol, propylene glycol, and liquid polyethylene glycol, and the like), and suitable mixtures thereof. Proper fluidity can be maintained, for example, by the use of surfactants. In many cases, it will be preferable to include isotonic agents, for example, sugars, polyalcohols such as mannitol, sorbitol, or sodium chloride in the composition. In some embodiments, prolonged absorption of the injectable compositions can be brought about by including in the composition an agent that delays absorption, for example, monostearate salts and gelatin.

[0745] Sterile injectable solutions can be prepared by incorporating the active compound in the required amount in an appropriate solvent with one or a combination of ingredients enumerated above, as required, followed by sterilization and/or microfiltration. In some embodiments, pharmaceutical compositions can be prepared as described herein and/or methods known in the art.

[0746] These compositions may also contain adjuvants such as preservatives, wetting agents, emulsifying agents and dispersing agents. Prevention of the presence of microorganisms may be ensured both by sterilization procedures, and by the inclusion of various antibacterial and antifungal agents, for example, paraben, chlorobutanol, phenol sorbic acid, and the like. It may also be desirable to include isotonic agents, such as sugars, sodium chloride, and the like into pharmaceutical compositions described herein. In addition, prolonged absorption of the injectable pharmaceutical form may be brought about by the inclusion of agents which delay absorption such as aluminum monostearate and gelatin.

[0747] Formulations of pharmaceutical compositions described herein may be prepared by any method known or hereafter developed in the art of pharmacology. In general, such preparatory methods include the step of bringing active ingredient(s) into association with a diluent or another excipient and/or one or more other accessory ingredients, and then, if necessary and/or desirable, shaping and/or packaging the product into a desired single- or multi-dose unit.

[0748] A pharmaceutical composition in accordance with the present disclosure may be prepared, packaged, and/or sold in bulk, as a single unit dose, and/or as a plurality of single unit doses. As used herein, a “unit dose” is discrete amount of the pharmaceutical composition comprising a predetermined amount of at least one RNA product produced using a system and/or method described herein.

[0749] Relative amounts of polyribonucleotides encapsulated in lipid nanoparticles, a pharmaceutically acceptable excipient, and/or any additional ingredients in a pharmaceutical composition can vary, depending upon the subject to be treated, target cells, diseases or disorders, and may also further depend upon the route by which the composition is to be administered.

[0750] In some embodiments, pharmaceutical compositions described herein are formulated into pharmaceutically acceptable dosage forms by conventional methods known to those of skill in the art. Actual dosage levels of the active ingredients (e.g., polyribonucleotides encapsulated in lipid nanoparticles) in the pharmaceutical compositions described herein may be varied so as to obtain an amount of the active ingredient which is effective to achieve the desired therapeutic response for a particular patient, composition, and mode of administration, without being toxic to the patient. The selected dosage level will depend upon a variety of pharmacokinetic factors including the activity of the particular compositions of the present disclosure employed, the route of administration, the time of administration, the rate of excretion of the particular compound being employed, the duration of the treatment, other drugs, compounds and/or materials used in combination with the particular compositions employed, the age, sex, weight, condition, general health and prior medical history of the patient being treated, and like factors well known in the medical arts.

[0751] A physician having ordinary skill in the art can readily determine and prescribe the effective amount of the pharmaceutical composition required. For example, a physician could start doses of active ingredients (e.g., polyribonucleotides encapsulated in lipid nanoparticles) employed in the pharmaceutical composition at levels lower than that required in order to achieve the desired therapeutic effect and gradually increase the dosage until the desired effect is achieved.

[0752] In some embodiments, a pharmaceutical composition described herein is formulated (e.g., but not limited to, for intravenous, intramuscular, or subcutaneous administration) to deliver an active dose that confers a plasma concentration of an antibody agent encoded by at least one polyribonucleotide (e.g., ones described herein) that mediates pharmacological activity via its dominant mode of action, viral neutralization. In some embodiments, the antibody agent is directed against a CD4 binding site of HIV. In some embodiments, a pharmaceutical composition described herein is formulated (e.g., but not limited to, for intravenous, intramuscular, or subcutaneous administration) to deliver an active dose that confers a plasma concentration of at least about 500 ng/ml of an anti-HIV antibody agent (e.g., an anti-HIV antibody agent targeting a CD4 binding site) encoded by at least one polyribonucleotide (e.g., ones described herein) that mediates pharmacological activity via its dominant mode of action, viral neutralization.

[0753] In some embodiments, a pharmaceutical composition is formulated (e.g., but not limited to, for intravenous, intramuscular, or subcutaneous administration) to deliver a dose of 5 mg RNA/kg.

[0754] In some embodiments, a pharmaceutical composition described herein may further comprise one or more additives, for example, in some embodiments that may enhance stability of such a composition under certain conditions. Examples of additives may include but are not limited to salts, buffer substances, preservatives, and carriers. For example, in some embodiments, a pharmaceutical composition may further comprise a cryoprotectant (e.g., sucrose) and/or an aqueous buffered solution, which may in some embodiments include one or more salts, including, e.g., alkali metal salts or alkaline earth metal salts such as, e.g., sodium salts, potassium salts, and/or calcium salts.

[0755] In some embodiments, a pharmaceutical composition described herein may further comprises one or more active agents other than at least one polyribonucleotide encoding an antibody agent directed against an HIV CD4 binding site. For example, in some embodiments, such an other active agent may be or comprise an antiviral agent. In some embodiments, an exemplary antiviral agent may be one included in Table 1 herein.

[0756] The present disclosure provides the recognition that anti-HIV antibodies may be useful in combination with polyribonucleotides and/or compositions provided herein, for example, for treating or preventing HIV. Exemplary anti-HIV antibodies that can be used with compositions described herein include, but are not limited to, 1-18, PGT121, 3BNC117, b12, 10-1074, 10E8, 10E8v4, VRC01, VRC07-523-L/S, or PGDM1400, fragments thereof, or combinations thereof.

[0757] The present disclosure further provides the insight that combinations of anti-HIV antibody agents can be encoded in polyribonucleotides. Delivery of a combination of anti-HIV antibody agents via delivery of polyribonucleotides can achieve similar titers of antibody agent in the serum or plasma of a subject. Moreover, a combination of anti-HIV antibody agents via delivery of polyribonucleotides can also broadly neutralize various HIV strains.

[0758] In view of these insights, the present disclosure provides compositions comprising one or more polyribonucleotides encoding the heavy chain complementarity determining regions (CDRs) and/or light chain CDRs of PGT121, 3BNC117, b12, 10-1074, 10E8, 10E8v4, VRC01, VRC07-523-L/S, or PGDM1400 can be used in combination with a polyribonucleotide and/or composition provided herein described. For instance, in some embodiments, one or more polyribonucleotides encoding the heavy chain complementarity determining regions (HCDRs) and/or light chain CDRs (LCDRs) of PGT121, 3BNC117, b12, 10-1074, 10E8, 10E8v4, VRC01, VRC07-523-L/S, or PGDM1400 can be used in combination with a polyribonucleotide encoding an immunoglobulin chain of an antibody agent, wherein the immunoglobulin chain comprises a heavy chain variable (VH) domain, and the VH domain comprises (a) an HCDR1 comprising an amino acid sequence according to SEQ ID NO: 6; (b) an HCDR2 comprising an amino acid sequence according to SEQ ID NO: 9; and (c) an HCDR3 comprising an amino acid sequence according to SEQ ID NO: 12. In some embodiments, one or more polyribonucleotides encoding the HCDRs and/or LCDRs of PGT121, 3BNC117, b12, 10-1074, 10E8, 10E8v4, VRC01, VRC07-523-L/S, or PGDM1400 can be used in combination with a polyribonucleotide encoding an immunoglobulin chain of an antibody agent, wherein the immunoglobulin chain comprises a light chain variable (VL) domain, and the VL domain comprises (a) an LCDR1 comprising an amino acid sequence according to SEQ ID NO: 15; (b) an LCDR2 comprising an amino acid sequence according to SEQ ID NO: 18 (GTS); and (c) an LCDR3 comprising an amino acid sequence according to SEQ ID NO: 21. In some embodiments, one or more polyribonucleotides encoding the HCDRs and/or LCDRs of PGT121, 3BNC117, b12, 10-1074, 10E8, 10E8v4, VRC01, VRC07-523-L/S, or PGDM1400 can be used in combination with a polyribonucleotide encoding an immunoglobulin chain of an antibody agent, wherein the immunoglobulin chain comprises a heavy chain variable (VH) domain and a light chain variable (VL) domain, wherein the VH domain comprises (a) an HCDR1 comprising an amino acid sequence according to SEQ ID NO: 6; (b) an HCDR2 comprising an amino acid sequence according to SEQ ID NO: 9; and (c) an HCDR3 comprising an amino acid sequence according to SEQ ID NO: 12; and the VL domain comprises (a) an LCDR1 comprising an amino acid sequence according to SEQ ID NO: 15; (b) an LCDR2 comprising an amino acid sequence according to SEQ ID NO: 18 (GTS); and (c) an LCDR3 comprising an amino acid sequence according to SEQ ID NO: 21. The present disclosure further provides the insight that compositions comprising a combination of such polyribonucleotides can be useful for treating or preventing HIV.

[0759] In some embodiments, a pharmaceutical composition provided herein is a preservative-free, sterile RNA-lipid nanoparticle dispersion in an aqueous buffer for intravenous or intramuscular administration.

[0760] Although the descriptions of pharmaceutical compositions provided herein are principally directed to pharmaceutical compositions that are suitable for administration to humans, it will be understood by the skilled artisan that such compositions are generally suitable for administration to animals of all sorts. Modification of pharmaceutical compositions suitable for administration to humans in order to render the compositions suitable for administration to various animals is well understood, and the ordinarily skilled veterinary pharmacologist can design and/or perform such modification with merely ordinary, if any, experimentation.

### VI. Patient Populations

[0761] Technologies provided herein can be useful for treatment and/or prevention of HIV infection. As described herein, technologies include polyribonucleotides encoding anti-HIV antibody agents, immunoglobulin chains thereof, or fragments thereof. Accordingly, the present disclosure provides pharmaceutical compositions for treatment and/or prevention of HIV. In some embodiments, a pharmaceutical composition comprises a polyribonucleotides as described herein.

[0762] In some embodiments, a subject is one suffering from and/or is susceptible to HIV infection. In some embodiments, a subject may be defined by one or more criterion such as age group, gender, genetic background, preexisting clinical conditions, and/or prior exposure to therapy.

[0763] In some embodiments, a subject may be determined to be classified as needing a pharmaceutical composition described herein in accordance with the screening tools for HIV. For example, in some embodiments, a subject may be determined to be classified as needing a pharmaceutical composition described herein according to the results obtained in HIV-1 enzyme immunoassays (EIA), HIV-1 western blot, an HIV viral neutralization assay (VNT), and/or PCR test.

[0764] In some embodiments, a subject is a model organism. In preferred embodiments, a subject is a human. In some embodiments, a subject is between 18-65 years of age. In some embodiments, a subject is an age in a range of from about 0 months to about 6 months old, from about 6 to about 12 months old, from about 6 to about 18 months old, from about 18 to about 36 months old, from about 1 to about 5 years old, from about 5 to about 10 years old, from about 10 to about 15 years old, from about 15 to about 20 years old, from about 20 to about 25 years old, from about 25 to about 30 years old, from about 30 to about 35 years old, from about 35 to about 40 years old, from about 40 to about 45 years old, from about 45 to about 50 years old, from about 50 to about 55 years old, from about 55 to about 60 years old, from about 60 to about 65 years old, from about 65 to about 70 years old, from about 70 to about 75 years old, from about 75 to about 80 years old, from about 80 to about 85 years old, from about 85 to about 90 years old, from about 90 to about 95 years old, or from about 95 to about 100 years old.

[0765] In some embodiments, a subject is a human infant. In some embodiments, a subject is a human toddler. In some embodiments, a subject is a human child. In some embodiments, a subject is a human adult. In some embodiments, a subject is an elderly human.

[0766] In some embodiments, a subject comprises a specific HIV viral load. In some embodiments, a subject comprises a viral load that is greater than 400 copies/ml (e.g., greater than 400, greater than 500, greater than 1,000, greater than 2,000, greater than 4,000, greater than 8,000, greater than 10,000, greater than 20,000, greater than 40,000, greater than 100,000, or greater than 400,000 copies/mL) in plasma or serum. In some embodiments, a subject comprises an undetectable viral load. In some embodiments, a subject comprises a viral load of <400 copies/mL (e.g., less than 400, less than 300, less than 200, less than 100, less than 75, or less than 50 copies/mL) in plasma or serum.

[0767] In some embodiments, a subject comprises a normal CD4+ T-cell count (i.e., greater than 350 cells/mm³). In some embodiments, a subject comprises an abnormal CD4+ T-cell count. In some embodiments, a subject comprises a CD4+ T-cell count of at least 450 cells/mm³.

[0768] In some embodiments, a subject has not been exposed to HIV. In some embodiments, a subject has or it as risk of developing an HIV infection. In some embodiments, a subject may have had an exposure to HIV. In some embodiments, a subject may have a latent HIV infection.

[0769] In some embodiments, a subject is in the primary HIV infection or acute phase. In some embodiments, a subject is suffering from fever, lymph node enlargement, fatigue, rash, gastrointestinal symptoms, acute neuropathy, myalgias and/or malaise, or any other symptom of acute HIV infection. In some embodiments, a subject is in the primary stage of HIV infection and is asymptomatic.

[0770] In some embodiments, a subject is suffering from additional co-morbidities related or unrelated to HIV infection, including any of the following: cardiovascular disease, bone disease, renal and hepatic dysfunction. With the emergence of antiretroviral therapies and long term treatment of HIV, cancer has become an increasingly larger cause of mortality in HIV subjects (see Uldrick, Thomas S., et al. J. of Clinical Oncology, 35.33:3774, 2017, which is herein incorporated by reference). In some embodiments, a subject is additionally suffering from and/or is susceptible to cancer. Exemplary cancers include AIDS-associated cancers such as aggressive B-cell lymphomas (i.e., diffuse large B-cell lymphoma, Burkitt's lymphoma, plasmablastic lymphoma, primary effusion lymphoma, and primary CNS lymphoma), Kaposi sarcoma, and cervical cancer, and non-AIDS-associated cancers, such as classic Hodgkin lymphoma, lung cancer, anal cancer, liver cancer, and head and neck cancers.

[0771] In some embodiments, a subject has not previously received an HIV therapy.

[0772] In some embodiments, a subject is under analytical treatment interruption (ATI).

[0773] In some embodiments, a subject suffering from an HIV infection may have received or is currently receiving other HIV therapy. In some embodiments, a subject is or has received antiretroviral therapy (ART). In some embodiments, a subject is currently receiving or has received one or more ART treatments listed in Table 1.

[0774] In some embodiments, a subject has been receiving ART for greater than 1 week, greater than 2 weeks, greater than 3 weeks, greater than 4 weeks, greater than 5 weeks, greater than 6 weeks, greater than 7 weeks, greater than 8 weeks, greater than 12 weeks, greater than 4 months, greater than 5 months, greater than 6 months, greater than 7 months, greater than 8 months, greater than 9 months, greater than 10 months, or greater than 1 year. In some embodiments, a subject is responsive to ART at the time a polyribonucleotide, composition or pharmaceutical composition described herein is administered. In some embodiments, a subject is not responsive to one or more ART agents at the time a polyribonucleotide, composition or pharmaceutical composition described herein is administered.

[0775] In some embodiments a subject received ART within less than 6 months of receiving an HIV diagnosis (e.g., less than 12 weeks of receiving an HIV diagnosis).

[0776] In some embodiments, a subject has previously received ART. In some embodiments, a subject received prior ART treatment for greater than 1 week, greater than 2 weeks, greater than 3 weeks, greater than 4 weeks, greater than 5 weeks, greater than 6 weeks, greater than 7 weeks, greater than 8 weeks, greater than 12 weeks, greater than 4 months, greater than 5 months, greater than 6 months, greater than 7 months, greater than 8 months, greater than 9 months, greater than 10 months, or greater than 1 year. In some embodiments, a subject was responsive to the prior ART treatment. In some embodiments, a subject was not responsive to the prior ART treatment.

[0777] In some embodiments, a subject with an HIV infection is clinically stable. In some embodiments, a subject is characterized by any one of the following characteristics: an absolute neutrophil count >1,000/mm³; hemoglobin levels >10.0 g/dL for men and >9.0 g/dL for women; platelet count >100,000/mm³; an estimated or a measured glomerular filtration rate >60 mL/min/1.73m2 as determined by the National Institutes of Health (NIH) Clinical Center laboratory; aspartate aminotransferase (AST) and alanine aminotransferase (ALT) levels of <2.5 times upper limit of normal (ULN); or direct bilirubin within the normal range for the NIH Clinical Center laboratory.

[0778] In some embodiments, a subject has a primary HIV infection. A primary HIV infection may be defined by one or more of the following: a detectable plasma HIV-1 RNA levels of >2000 copies/mL with a negative result from an HIV-1 enzyme immunoassays (EIA); a positive result from an HIV-1 EIA with a negative or indeterminate result from an HIV-1 western blot or another confirmatory antibody test that subsequently evolves to a confirmed positive result; a negative result from an HIV-1 EIA within the past 4 months and HIV-1 RNA levels of >400,000 copies/mL, in the setting of a potential exposure to HIV-1, or a negative result from an HIV-1 EIA within 6 months prior to a positive result from an HIV-1 EIA and an HIV-1 western blot or another confirmatory antibody test; presence of low level of HIV antibodies as determined by having a positive EIA or a positive Western blot with a non-reactive detuned EIA according to a serologic testing algorithm for recent infection.

[0779] In some embodiments, a subject is receiving continuous ART treatment and maintains a plasma HIV level that is undetectable or less than 400 copies/mL for greater than 1 month (e.g., greater than 1 month, greater than 2 months, greater than 3 months, greater than 4 months, greater than 6 months, greater than 1 year). In some embodiments, a subject has an HIV viral load (i.e., plasma viremia) of between about 200 and 5,000 copies/mL. In some embodiments, a subject has at least two documented viral levels in plasma of at least 200 copies/mL in the 12 months before treatment.

[0780] In some embodiments, a subject has received no ART in the last month. In some embodiments, a subject has received no ART in the last year. In some embodiments, a subject has received no ART in the last 2 years.

[0781] In some embodiments, a subject does not meet any one of the following criteria: chronic hepatitis B infection, as evidenced by a positive test for hepatitis B surface antigen (HBsAg), or chronic hepatitis C virus (HCV) infection, as evidenced by a positive test for HCV RNA; have had an HIV immunotherapy or vaccine(s) received within 1 year prior to treatment have received any licensed or experimental non-HIV vaccination (e.g., hepatitis B, influenza, pneumococcal polysaccharide) received within 2 weeks prior to treatment; have received other investigational study agent within 28 days of treatment; have an any active malignancy that may require systemic chemotherapy or radiation therapy; have received immunosuppressive medications within 3 months prior to enrollment (not including corticosteroid nasal spray or inhaler, topical corticosteroids for mild, uncomplicated dermatitis; or oral/parenteral corticosteroids administered for non-chronic conditions not expected to recur); have a history or other clinical evidence of: significant or unstable cardiac or cerebrovascular disease (e.g., angina, congestive heart failure, recent stroke or myocardial infarction); severe illness, malignancy, immunodeficiency other than HIV; or documented multiclass ART drug resistance.

### VII. Treatment Methods

[0782] In some embodiments, a pharmaceutical composition described herein can be taken up by cells for production of an encoded antibody agent at therapeutically relevant serum concentrations. Accordingly, the present disclosure provides methods of using pharmaceutical compositions described herein. For example, in some embodiments, a method provided herein comprises administering a pharmaceutical composition described herein to a subject.

[0783] As used herein, the term “administering” or “administration” typically refers to the administration of a composition to a subject to achieve delivery of an agent (e.g., at least one polyribonucleotide encoding an antibody agent described herein) that is, or is included in, a composition to a target site or a site to be treated. Those of ordinary skill in the art will be aware of a variety of routes that may, in appropriate circumstances, be utilized for administration to a subject, for example a human. Administration may be, for example, bronchial (e.g., by bronchial instillation), buccal, dermal (which may be or comprise, for example, one or more of topical to the dermis, intradermal, interdermal, transdermal, etc.), enteral, intra-arterial, intradermal, intragastric, intramedullary, intramuscular, intranasal, intraperitoneal, intrathecal, intravenous, intraventricular, within a specific organ (e.g., intrahepatic), mucosal, nasal, oral, rectal, subcutaneous, sublingual, topical, tracheal (e.g., by intratracheal instillation), vaginal, vitreal, etc. In preferred embodiments, administration may be intramuscular, intravenous, or subcutaneous.

[0784] In some embodiments, administration of a pharmaceutical composition results in delivery of one or more polyribonucleotides as described herein (e.g., encoding an immunoglobulin chain of an antibody agent) to a subject. In some embodiments, administering a pharmaceutical composition to a subject results in expression in the subject of an immunoglobulin chain of an antibody agent encoded by an administered polyribonucleotide. In some embodiments, administering a pharmaceutical composition to a subject results in expression in the subject of an antibody agent encoded by an administered polyribonucleotide.

[0785] In some embodiments, a therapeutically relevant concentration of an antibody agent or immunoglobulin chain thereof can be at least 1 μg/ml in the subject's serum or plasma.

[0786] In some embodiments, an antibody agent expressed following administration of a pharmaceutical composition described herein is characterized in that it exhibits a geometric mean IC50 of less than 1 g/ml against at least five sensitive HIV-1 clones when tested in the TZM-bl cell pseudovirus neutralization assay. In some embodiments, an antibody agent expressed following administration of a pharmaceutical composition described herein is characterized in that it exhibits a geomean IC50 of less than 0.15 μg/ml against the a global reference panel when tested in the TZM-bl cell pseudovirus neutralization assay. In some embodiments, an antibody agent expressed following administration of a pharmaceutical composition described herein is characterized in that it is capable of neutralizing one or more HIV strains when tested in the TZM-bl cell pseudovirus neutralization assay at antibody agent concentrations up to 25 g/ml. In some embodiments, an antibody agent expressed following administration of a pharmaceutical composition described herein is characterized in that it is capable of neutralizing one or more HIV strains at a level that is within 3-fold of a level of an equivalent amount of recombinant benchmark antibody. In some embodiments, a recombinant benchmark antibody is an unmodified wild-type IgG antibody comprising the same HCDR1, HCDR2, HCDR2, LCDR1, LCDR2, and LCDR3 as the antibody agent.

[0787] In some embodiments, administration may involve only a single dose. In some embodiments, administration may involve application of a fixed number of doses.

[0788] In some embodiments, administration may involve dosing that is intermittent (e.g., a plurality of doses separated in time) and/or periodic (e.g., individual doses separated by a common period of time) dosing. In some embodiments, administration may involve continuous dosing (e.g., perfusion) for at least a selected period of time.

[0789] In some embodiments, a dosing regimen comprises a plurality of doses each of which is separated in time from other doses. In some embodiments, individual doses are separated from one another by a time period of the same length; in some embodiments, a dosing regimen comprises a plurality of doses and at least two different time periods separating individual doses. In some embodiments, all doses within a dosing regimen are of the same unit dose amount. In some embodiments, different doses within a dosing regimen are of different amounts. In some embodiments, a dosing regimen comprises a first dose in a first dose amount, followed by one or more additional doses in a second dose amount different from the first dose amount. In some embodiments, a dosing regimen comprises a first dose in a first dose amount, followed by one or more additional doses in a second dose amount same as the first dose amount. In some embodiments, a dosing regimen is correlated with a desired or beneficial outcome when administered across a relevant population (i.e., is a therapeutic dosing regimen).

[0790] Those skilled in the art are aware that immunotherapies (e.g., polyribonucleotides encoding antibody agents) can be administered in dosing cycles. In some embodiments, pharmaceutical compositions described herein are administered in one or more dosing cycles.

[0791] In some embodiments, one dosing cycle is at least 3 or more days (including, e.g., at least 4, at least 5, at least 6, at least 7, at least 8, at least 9, at least 10, at least 11, at least 12, at least 13, at least 14, at least 15, at least 16, at least 17, at least 18, at least 19, at least 20, at least 21, at least 22, at least 23, at least 24, at least 25, at least 26, at least 27, at least 28, at least 29, or at least 30 days. In some embodiments, one dosing cycle is at least 21 days.

[0792] In some embodiments, one dosing cycle may involve multiple doses, e.g., according to a pattern such as, for example, a dose may be administered daily within a dosing cycle, or a dose may be administered every 2 days, every 3 days, every 4 days, every 5 days, every 6 days, every 7 days, every 2 weeks, monthly, every 2 months within a cycle.

[0793] In some embodiments, multiple dosing cycles may be administered. For example, in some embodiments, at least 2 dosing cycles (including, e.g., at least 3 dosing cycles, at least 4 dosing cycles, at least 5 dosing cycles, at least 6 dosing cycles, at least 7 dosing cycles, at least 8 dosing cycles, at least 9 dosing cycles, at least 10 dosing cycles, or more) can be administered. In some embodiments, the number of dosing cycles to be administered may vary with types of treatment (e.g., monotherapy vs. combination therapy). In some embodiments, at least 3-8 dosing cycles may be administered.

[0794] In some embodiments, there may be a “rest period” between dosing cycles; in some embodiments, there may be no rest period between dosing cycles. In some embodiments, there may be sometimes a rest period and sometimes no rest period between dosing cycles.

[0795] In some embodiments, a rest period may have a length within a range of several days to several months. For example, in some embodiments, a rest period may have a length of at least 3 days or more, including, e.g., at least 4 days, at least 5 days, at least 6 days, at least 7 days, at least 8 days, at least 9 days, at least 10 days, at least 11 days, at least 12 days, at least 13 days, at least 14 days or more. In some embodiments, a rest period may have a length of at least 1 week or more, including, e.g., at least 2 weeks, at least 3 weeks, at least 4 weeks, or more.

[0796] Dosage of pharmaceutical compositions described herein may vary with a number of factors including, e.g., but not limited to body weight of a subject to be treated, cancer types and/or cancer stages, and/or monotherapy or combination therapy. In some embodiments, a dosing cycle involves administration of a set number and/or pattern of doses. For example, in some embodiments, a pharmaceutical composition described herein is administered at least one dose per dosing cycle, including, e.g., at least two doses per dosing cycle, at least three doses per dosing cycle, at least four doses per dosing cycle, or more.

[0797] In some embodiments, a dosing cycle involves administration of a set cumulative dose, e.g., over a particular period of time, and optionally via multiple doses, which may be administered, for example, at set interval(s) and/or according to a set pattern. In some embodiments, a set cumulative dose may be administered via multiple doses at set intervals such that there is at least some temporal overlap in biological and/or pharmacokinetics effects generated by such multiple doses on a target cell or on a subject being treated. In some embodiments, a set cumulative dose may be administered via multiple doses at set intervals such that biological and/or pharmacokinetics effects generated by such multiple doses on a target cell or on a subject being treated may be additive. By way of example only, in some embodiments, a set cumulative dose of X mg may be administered via two doses with each dose of X/2 mg, wherein such two doses are administered sufficiently close in time such that biological and/or pharmacokinetics effects generated by each X/2-mg dose on a target cell or on a subject being treated may be additive.

[0798] The present disclosure provides the recognition that the timing of administration of multiple doses of an antibody agent described herein, alone or in combination with another anti-HIV antibody can impact therapeutic efficacy. For example, without wishing to be bound to any particular theory, in the event a dose of a second RibobNAb is administered too long after a dose of a first RibobNAb is administered, a period of time exists when the treatment essentially involves a monotherapy, which could put the first RibobNAb in jeopardy of viral escape.

[0799] In some embodiments, dosing may be adjusted based on response of a subject receiving the therapy. For example, in some embodiments, dosing may involve administration of a higher dose followed later by administration of a lower dose if one or more parameters for safety pharmacology assessment indicates that the prior dose may not satisfy the medical safety requirement according to a physician. In some embodiments, dose escalation may be performed at one or more of the levels. Without wishing to be bound by any particular theory, the present disclosure, among other things, provides an insight that a pharmaceutically guided dose escalation (PGDE) method may be applied to determine an appropriate dose of pharmaceutical compositions described herein.

[0800] In some embodiments, pharmaceutical compositions described herein can be administered to subjects as monotherapy.

[0801] In some embodiments, a pharmaceutical composition provided herein may be administered as part of combination therapy. In some embodiments, a pharmaceutical composition provided herein may be administered as part of a combination therapy comprising the pharmaceutical composition and one or more anti-HIV antibody agents or one or more anti-HIV RibobNAbs. In some embodiments, one or more HIV antibody agents can each comprise CDRs from 1-18, PGT121, 3BNC117, b12, 10-1074, 10E8, 10E8v4, VRC01, VRC07-523-L/S, or PGDM1400. In some embodiments, one or more HIV RibobNAbs can each comprise CDRs from 1-18, PGT121, 3BNC117, b12, 10-1074, 10E8, 10E8v4, VRC01, VRC07-523-L/S, PGDM1400, or a combination thereof.

[0802] In some embodiments, a pharmaceutical composition provided herein may be administered as part of a combination therapy comprising the pharmaceutical composition and ART. In some embodiments, the ART may comprises one or more agents provided in Table 1.

[0803] In some embodiments, subjects receiving a composition provided herein (e.g., a pharmaceutical composition) may be monitored periodically over a dosing regimen to assess efficacy of the administered treatment. For example, in some embodiments, efficacy of an administered treatment may be assessed periodically, e.g., weekly, biweekly, every 4 weeks, every 5 weeks, every 6 weeks, every 7 weeks, every 8 weeks, or longer.

### VIII. Methods of Manufacture

[0804] Individual polyribonucleotides can be produced by methods known in the art. For example, in some embodiments, polyribonucleotides can be produced by in vitro transcription, for example, using a DNA template. A plasmid DNA used as a template for in vitro transcription to generate a polyribonucleotide described herein is also within the scope of the present disclosure.

[0805] A DNA template is used for in vitro RNA synthesis in the presence of an appropriate RNA polymerase (e.g., a recombinant RNA-polymerase such as a T7 RNA-polymerase) with ribonucleotide triphosphates (e.g., ATP, CTP, GTP, UTP). In some embodiments, polyribonucleotides (e.g., ones described herein) can be synthesized in the presence of modified ribonucleotide triphosphates. By way of example only, in some embodiments, pseudouridine (ψ), N1-methyl-pseudouridine (m1ψ), or 5-methyl-uridine (m5U) can be used to replace uridine triphosphate (UTP). In some embodiments, pseudouridine (ψ) can be used to replace uridine triphosphate (UTP). In some embodiments, N1-methyl-pseudouridine (m1ψ) can be used to replace uridine triphosphate (UTP). In some embodiments, 5-methyl-uridine (m5U) can be used to replace uridine triphosphate (UTP).

[0806] As will be clear to those skilled in the art, during in vitro transcription, an RNA polymerase (e.g., as described and/or utilized herein) typically traverses at least a portion of a single-stranded DNA template in the 3′→5′ direction to produce a single-stranded complementary RNA in the 5′→3′ direction.

[0807] In some embodiments where a polyribonucleotide comprises a polyA tail, one of those skill in the art will appreciate that such a polyA tail may be encoded in a DNA template, e.g., by using an appropriately tailed PCR primer, or it can be added to a polyribonucleotide after in vitro transcription, e.g., by enzymatic treatment (e.g., using a poly(A) polymerase such as an E. coli Poly(A) polymerase). Suitable poly(A) tails are described herein above. For example, in some embodiments, a poly(A) tail comprises a nucleotide sequence according to SEQ ID NO: 474. In some embodiments, a poly(A) tail comprises a plurality of A residues interrupted by a linker. In some embodiments, a linker comprises the nucleotide sequence GCATATGAC (SEQ ID NO: 475).

[0808] In some embodiments, those skilled in the art will appreciate that addition of a 5′ cap to an RNA (e.g., mRNA) can facilitate recognition and attachment of the RNA to a ribosome to initiate translation and enhances translation efficiency. Those skilled in the art will also appreciate that a 5′ cap can also protect an RNA product from 5′ exonuclease mediated degradation and thus increases half-life. Methods for capping are known in the art; one of ordinary skill in the art will appreciate that in some embodiments, capping may be performed after in vitro transcription in the presence of a capping system (e.g., an enzyme-based capping system such as, e.g., capping enzymes of vaccinia virus). In some embodiments, a cap may be introduced during in vitro transcription, along with a plurality of ribonucleotide triphosphates such that a cap is incorporated into a polyribonucleotide during transcription (also known as co-transcriptional capping). In some embodiments, a GTP fed-batch procedure with multiple additions in the course of the reaction may be used to maintain a low concentration of GTP in order to effectively cap the RNA. Suitable 5′ cap are described herein above. For example, in some embodiments, a 5′ cap comprises m7(3′OMeG)(5′)ppp(5′)(2′OMeA)pG.

[0809] Following RNA transcription, a DNA template is digested. In some embodiments, digestion can be achieved with the use of DNase I under appropriate conditions.

[0810] In some embodiments, in-vitro transcribed polyribonucleotides may be provided in a buffered solution, for example, in a buffer such as HEPES, a phosphate buffer solution, a citrate buffer solution, an acetate buffer solution; in some embodiments, such solution may be buffered to a pH within a range of, for example, about 6.5 to about 7.5; in some embodiments approximately 7.0. In some embodiments, production of polyribonucleotides may further include one or more of the following steps: purification, mixing, filtration, and/or filling.

[0811] In some embodiments, polyribonucleotides can be purified (e.g., in some embodiments after in vitro transcription reaction), for example, to remove components utilized or formed in the course of the production, like, e.g., proteins, DNA fragments, and/or or nucleotides. Various nucleic acid purifications that are known in the art can be used in accordance with the present disclosure. Certain purification steps may be or include, for example, one or more of precipitation, column chromatography (including, e.g., but not limited to anionic, cationic, hydrophobic interaction chromatography (HIC)), solid substrate-based purification (e.g., magnetic bead-based purification). In some embodiments, polyribonucleotides may be purified using magnetic bead-based purification, which in some embodiments may be or comprise magnetic bead-based chromatography. In some embodiments, polyribonucleotides may be purified using hydrophobic interaction chromatography (HIC) and/or diafiltration. In some embodiments, polyribonucleotides may be purified using HIC followed by diafiltration.

[0812] In some embodiments, dsRNA may be obtained as side product during in vitro transcription. In some such embodiments, a second purification step may be performed to remove dsRNA contamination. For example, in some embodiments, cellulose materials (e.g., microcrystalline cellulose) may be used to remove dsRNA contamination, for examples in some embodiments in a chromatographic format. In some embodiments, cellulose materials (e.g., microcrystalline cellulose) can be pretreated to inactivate potential RNase contamination, for example in some embodiments by autoclaving followed by incubation with aqueous basic solution, e.g., NaOH. In some embodiments, cellulose materials may be used to purify polyribonucleotides according to methods described in WO 2017/182524, the entire content of which is incorporated herein by reference.

[0813] In some embodiments, a batch of polyribonucleotides may be further processed by one or more steps of filtration and/or concentration. For example, in some embodiments, polyribonucleotide(s), for example, after removal of dsRNA contamination, may be further subject to diafiltration (e.g., in some embodiments by tangential flow filtration), for example, to adjust the concentration of polyribonucleotides to a desirable RNA concentration and/or to exchange buffer to a drug substance buffer.

[0814] In some embodiments where an antibody agent is encoded by a first polyribonucleotide encoding a first immunoglobulin chain and a second polyribonucleotide encoding a second immunoglobulin chain such that both, when both translated and expressed, form a full antibody agent, a batch of a first polyribonucleotides and a batch of a second polyribonucleotides, each after purification (e.g., as described herein) can be mixed in an appropriate ratio. For example, in some embodiments, such a first polyribonucleotide batch and a second polyribonucleotide batch may be mixed in a molar ratio of about 1:1.5 to about 1.5:1, e.g., in some embodiments in molar ratio of about 1:1.

[0815] In some embodiments, polyribonucleotides may be processed through 0.2 m filtration before they are filled into appropriate containers.

[0816] In some embodiments, polyribonucleotides and compositions thereof may be manufactured in accordance with a process as described herein, or as otherwise known in the art.

[0817] In some embodiments, polyribonucleotides and compositions thereof may be manufactured at a large scale. For example, in some embodiments, a batch of polyribonucleotides can be manufactured at a scale of greater than 1 g, greater than 2 g, greater than 3 g, greater than 4 g, greater than 5 g, greater than 6 g, greater than 7 g, greater than 8 g, greater than 9 g, greater than 10 g, greater than 15 g, greater than 20 g, or higher.

[0818] In some embodiments, RNA quality control may be performed and/or monitored at any time during production process of polyribonucleotides and/or compositions comprising the same. For example, in some embodiments, RNA quality control parameters, including one or more of RNA identity (e.g., sequence, length, and/or RNA natures), RNA integrity, RNA concentration, residual DNA template, and residual dsRNA, may be assessed and/or monitored after each or certain steps of a polyribonucleotide manufacturing process, e.g., after in vitro transcription, and/or each purification step.

[0819] In some embodiments, the stability of polyribonucleotides (e.g., produced by in vitro transcription) and/or compositions comprising two or more RNAs (e.g., one encoding a HC of an antibody and another encoding a LC of the antibody) can be assessed under various test storage conditions, for example, at room temperatures vs. fridge or sub-zero temperatures over a period of time (e.g., at least 3 months, at least 6 months, at least 9 months, at least 12 months, or longer). In some embodiments, polyribonucleotides (e.g., ones described herein) and/or compositions thereof may be stored stable at a fridge temperature (e.g., about 4° C. to about 10° C.) for at least 1 month or longer including, at least 2 months, at least 3 months, at least 4 months, at least 5 months, at least 6 months, at least 7 months, at least 8 months, at least 9 months, at least 10 months, at least 11 months, or at least 12 months or longer. In some embodiments, polyribonucleotides (e.g., ones described herein) and/or compositions thereof may be stored stable at a sub-zero temperature (e.g., −20° C. or below) for at least 1 month or longer including, at least 2 months, at least 3 months, at least 4 months, at least 5 months, at least 6 months, at least 7 months, at least 8 months, at least 9 months, at least 10 months, at least 11 months, or at least 12 months or longer. In some embodiments, polyribonucleotides (e.g., ones described herein) and/or compositions thereof may be stored stable at room temperature (e.g., at about 25° C.) for at least 1 month or longer.

[0820] In some embodiments, one or more assessments may be utilized during manufacture, or other preparation or use of polyribonucleotides (e.g., as a release test).

[0821] In some embodiments, one or more quality control parameters may be assessed to determine whether polyribonucleotides described herein meet or exceed acceptance criteria (e.g., for subsequent formulation and/or release for distribution). In some embodiments, such quality control parameters may include, but are not limited to RNA integrity, RNA concentration, residual DNA template and/or residual dsRNA. Certain methods for assessing RNA quality are known in the art; for example, one of skill in the art will recognize that in some embodiments, one or more analytical tests can be used for RNA quality assessment. Examples of such certain analytical tests may include but are not limited to gel electrophoresis, UV absorption, and/or PCR assay.

[0822] In some embodiments, a batch of polyribonucleotides may be assessed for one or more features as described herein to determine next action step(s). For example, a batch of polyribonucleotides can be designated for one or more further steps of manufacturing and/or formulation and/or distribution if RNA quality assessment indicates that such a batch of polyribonucleotides meet or exceed the relevant acceptance criteria. Otherwise, an alternative action can be taken (e.g., discarding the batch) if such a batch of polyribonucleotides does not meet or exceed the acceptance criteria.

[0823] In some embodiments, a batch of polyribonucleotides that satisfy assessment results can be utilized for one or more further steps of manufacturing and/or formulation and/or distribution.

### IX. DNA Constructs

[0824] Among other things, the present disclosure provides DNA constructs, for example that may encode one or more antibody agents as described herein, or components thereof. In some embodiments, DNA constructs provided by and/or utilized in accordance with the present disclosure are comprised in a vector.

[0825] Non-limiting examples of a vector include plasmid vectors, cosmid vectors, phage vectors such as lambda phage, viral vectors such as retroviral, adenoviral or baculoviral vectors, or artificial chromosome vectors such as bacterial artificial chromosomes (BAC), yeast artificial chromosomes (YAC), or P1 artificial chromosomes (PAC). In some embodiments, a vector is an expression vector. In some embodiments, a vector is a cloning vector. In general, a vector is a nucleic acid construct that can receive or otherwise become linked to a nucleic acid element of interest (e.g., a construct that is or encodes a payload, or that imparts a particular functionality, etc.)

[0826] Expression vectors, which may be plasmid or viral or other vectors, typically include an expressible sequence of interest (e.g., a coding sequence) that is functionally linked with one or more control elements (e.g., promoters, enhancers, transcription terminators, etc.). Typically, such control elements are selected for expression in a system of interest. In some embodiments, a system is ex vivo (e.g., an in vitro transcription system); in some embodiments, a system is in vivo (e.g., a bacterial, yeast, plant, insect, fish, vertebrate, mammalian cell or tissue, etc.).

[0827] Cloning vectors are generally used to modify, engineer, and/or duplicate (e.g., by replication in vivo, for example in a simple system such as bacteria or yeast, or in vitro, such as by amplification such as polymerase chain reaction or other amplification process). In some embodiments, a cloning vector may lack expression signals.

[0828] In many embodiments, a vector may include replication elements such as primer binding site(s) and/or origin(s) of replication. In many embodiments, a vector may include insertion or modification sites such as restriction endonuclease recognition sites and/or guide RNA binding sites, etc.

[0829] In some embodiments, a vector is a viral vector (e.g., an AAV vector). In some embodiments, a vector is a non-viral vector. In some embodiments, a vector is a plasmid.

[0830] Those skilled in the art are aware of a variety of technologies useful for the production of recombinant polynucleotides (e.g., DNA or RNA) as described herein. For example, restriction digestion, reverse transcription, amplification (e.g., by polymerase chain reaction), Gibson assembly, etc., are well established and useful tools and technologies. Alternatively or additionally, certain nucleic acids may be prepared or assembled by chemical and/or enzymatic synthesis. In some embodiments, a combination of known methods is utilized to prepare a recombinant polynucleotide.

[0831] In some embodiments, polynucleotide(s) of the present disclosure are included in a DNA construct (e.g., a vector) amenable to transcription and/or translation.

[0832] In some embodiments, an expression vector comprises a polynucleotide that encodes proteins and/or polypeptides of the present disclosure operatively linked to a sequence or sequences that control expression (e.g., promoters, start signals, stop signals, polyadenylation signals, activators, repressors, etc.). In some embodiments, a sequence or sequences that control expression are selected to achieve a desired level of expression. In some embodiments, more than one sequence that controls expression (e.g., promoters) are utilized. In some embodiments, more than one sequence that controls expression (e.g., promoters) are utilized to achieve a desired level of expression of a plurality of polynucleotides that encode a plurality proteins and/or polypeptides. In some embodiments, a plurality of recombinant proteins and/or polypeptides are expressed from the same vector (e.g., a bi-cistronic vector, a tri-cistronic vector, multi-cistronic). In some embodiments, a plurality of polypeptides are expressed, each of which is expressed from a separate vector.

[0833] In some embodiments, an expression vector comprising a polynucleotide of the present disclosure is used to produce a RNA and/or protein and/or polypeptide in a host cell. In some embodiments, a host cell may be in vitro (e.g., a cell line)—for example a cell or cell line (e.g., Human Embryonic Kidney (HEK cells), Chinese Hamster Ovary cells, etc.) suitable for producing polynucleotides of the present disclosure and proteins and/or polypeptides encoded by said polynucleotides.

[0834] In some embodiments, an expression vector is an RNA expression vector. In some embodiments, an RNA expression vector comprises a polynucleotide template used to produce a RNA in cell-free enzymatic mix. In some embodiments, an RNA expression vector comprising a polynucleotide template is enzymatically linearized prior to in vitro transcription. In some embodiments, a polynucleotide template is generated through PCR as a linear polynucleotide template. In some embodiments, a linearized polynucleotide is mixed with enzymes suitable for RNA synthesis, RNA capping and/or purification. In some embodiments, the resulting RNA is suitable for producing proteins encoded by the RNA.

[0835] A variety of methods are known in the art to introduce an expression vector into host cells. In some embodiments, a vector may be introduced into host cells using transfection. In some embodiments, transfection is completed, for example, using calcium phosphate transfection, lipofection, or polyethylenimine-mediated transfection. In some embodiments, a vector may be introduced into a host cell using transduction.

[0836] In some embodiments, transformed host cells are cultured following introduction of a vector into a host cell to allow for expression of said recombinant polynucleotides. In some embodiments, a transformed host cells are cultured for at least 12 hours, 16 hours, 20 hours, 24 hours, 28 hours, 32 hours, 36 hours 40 hours, 44 hours, 48 hours, 52 hours, 56 hours, 60 hours, 64 hours, 68 hours, 72 hours or longer. Transformed host cells are cultured in growth conditions (e.g., temperature, carbon-dioxide levels, growth medium) in accordance with the requirements of a host cell selected. A skilled artisan would recognize culture conditions for host cells selected are well known in the art.

### EXEMPLARY NUMBERED EMBODIMENTS

[0837] Embodiment 1. A polyribonucleotide encoding an immunoglobulin chain of an antibody agent, wherein the immunoglobulin chain comprises a heavy chain variable (VH) domain, and the VH domain comprises: (a) a heavy chain complementarity determining region (HCDR)1 comprising an amino acid sequence according to SEQ ID NO: 6; (b) an HCDR2 comprising an amino acid sequence according to SEQ ID NO: 9; and (c) an HCDR3 comprising an amino acid sequence according to SEQ ID NO: 12.
[0838] Embodiment 2. The polyribonucleotide of embodiment 1, wherein the polyribonucleotide comprises a VH domain-encoding sequence, and wherein the VH domain-encoding sequence comprises: (a) the HCDR1-encoding sequence that comprises or consists of the ribonucleic acid sequence according to SEQ ID NO: 7; (b) the HCDR2-encoding sequence that comprises or consists of the ribonucleic acid sequence according to SEQ ID NO: 10; and (c) the HCDR3-encoding sequence that comprises or consists of the ribonucleic acid sequence according to SEQ ID NO: 13.
[0839] Embodiment 3. The polyribonucleotide of embodiment 1 or 2, wherein the VH domain comprises or consists of an amino acid sequence according to SEQ ID NO: 24.
[0840] Embodiment 4. The polyribonucleotide of any one of embodiments 1-3, wherein the VH domain-encoding sequence comprises or consists of a ribonucleic acid sequence according to SEQ ID NO: 25.
[0841] Embodiment 5. The polyribonucleotide of any one of embodiments 1-3, wherein the VH domain-encoding sequence comprises or consists of a ribonucleic acid sequence according to SEQ ID NO: 27.
[0842] Embodiment 6. The polyribonucleotide of any one of embodiments 1-5, wherein the immunoglobulin chain further comprises one or more constant domains, and wherein the VH domain is operably linked to the one or more constant domains.
[0843] Embodiment 7. The polyribonucleotide of embodiment 6, wherein the one or more constant domains comprise a CH2 domain.
[0844] Embodiment 8. The polyribonucleotide of embodiment 7, wherein the CH2 domain comprises or consists of an amino acid sequence according to SEQ ID NO: 53.
[0845] Embodiment 9. The polyribonucleotide of embodiment 7 or 8, wherein the polyribonucleotide comprises a ribonucleic acid sequence that encodes the CH2 domain and comprises or consists of a sequence according to SEQ ID NO: 54.
[0846] Embodiment 10. The polyribonucleotide of embodiment 7, wherein the CH2 domain comprises one or more substitution mutations, wherein the one or more substitution mutations comprise or consist of G236A, A330L, I332E, or a combination thereof, and wherein the substitution mutation positions are according to EU numbering.
[0847] Embodiment 11. The polyribonucleotide of embodiment 7 or 10, wherein the CH2 domain comprises one or more substitution mutations, wherein the one or more substitution mutations comprise or consist of G236A, and wherein the substitution mutation positions are according to EU numbering.
[0848] Embodiment 12. The polyribonucleotide of embodiment 7 or 10, wherein the CH2 domain comprises one or more substitution mutations, wherein the one or more substitution mutations comprise or consist of I332E, and wherein the substitution mutation positions are according to EU numbering.
[0849] Embodiment 13. The polyribonucleotide of embodiment 7 or 10, wherein the CH2 domain comprises one or more substitution mutations, wherein the one or more substitution mutations comprise or consist of G236A and I332E, and wherein the substitution mutation positions are according to EU numbering.
[0850] Embodiment 14. The polyribonucleotide of embodiment 7 or 10, wherein the CH2 domain comprises one or more substitution mutations, wherein the one or more substitution mutations comprise or consist of G236A, A330L, and I332E, and wherein the substitution mutation positions are according to EU numbering.
[0851] Embodiment 15. The polyribonucleotide of any one of embodiments 7, 10, and 14, wherein the CH2 domain comprises or consists of an amino acid sequence according to SEQ ID NO: 56.
[0852] Embodiment 16. The polyribonucleotide of any one of embodiments 7, 10, 14, and 15, wherein the polyribonucleotide comprises a ribonucleic acid sequence that encodes the CH2 domain and comprises or consists of a sequence according to SEQ ID NO: 57.
[0853] Embodiment 17. The polyribonucleotide of any one of embodiments 7, 10, and 13, wherein the CH2 domain comprises or consists of an amino acid sequence according to SEQ ID NO: 59.
[0854] Embodiment 18. The polyribonucleotide of any one of embodiments 7, 10, 13, and 17, wherein the polyribonucleotide comprises a ribonucleic acid sequence that encodes the CH2 domain and comprises or consists of a sequence according to SEQ ID NO: 60.
[0855] Embodiment 19. The polyribonucleotide of any one of embodiments 7, 10, and 11, wherein the CH2 domain comprises or consists of an amino acid sequence according to SEQ ID NO: 62.
[0856] Embodiment 20. The polyribonucleotide of any one of embodiments 7, 10, 11, and 19, wherein the polyribonucleotide comprises a ribonucleic acid sequence that encodes the CH2 domain and comprises or consists of a sequence according to SEQ ID NO: 63.
[0857] Embodiment 21. The polyribonucleotide of any one of embodiments 7, 10, and 12, wherein the CH2 domain comprises or consists of an amino acid sequence according to SEQ ID NO: 65.
[0858] Embodiment 22. The polyribonucleotide of any one of embodiments 7, 10, 12, and 21, wherein the polyribonucleotide comprises a ribonucleic acid sequence that encodes the CH2 domain and comprises or consists of a sequence according to SEQ ID NO: 66.
[0859] Embodiment 23. The polyribonucleotide of any one of embodiments 6-22, wherein the one or more constant domains comprise a CH3 domain.
[0860] Embodiment 24. The polyribonucleotide of embodiment 23, wherein the CH3 domain comprises or consists of an amino acid sequence according to SEQ ID NO: 68.
[0861] Embodiment 25. The polyribonucleotide of embodiment 23 or 24, wherein the polyribonucleotide comprises a ribonucleic acid sequence that encodes the CH3 domain and comprises or consists of a sequence according to SEQ ID NO: 69.
[0862] Embodiment 26. The polyribonucleotide of embodiment 23, wherein the CH3 domain comprises or consists of an amino acid sequence according to SEQ ID NO: 71.
[0863] Embodiment 27. The polyribonucleotide of embodiment 23 or 26, wherein the polyribonucleotide comprises a ribonucleic acid sequence that encodes the CH3 domain and comprises or consists of a sequence according to SEQ ID NO: 72.
[0864] Embodiment 28. The polyribonucleotide of embodiment 23, wherein the CH3 domain comprises one or more substitution mutations, wherein the one or more substitution mutations comprise or consist of M428L, N434S, or a combination thereof, and wherein the substitution mutation positions are according to EU numbering.
[0865] Embodiment 29. The polyribonucleotide of embodiment 23 or 28, wherein the CH3 domain comprises or consists of an amino acid sequence according to SEQ ID NO: 74.
[0866] Embodiment 30. The polyribonucleotide of any one of embodiments 23, 28, and 29, wherein the polyribonucleotide comprises a ribonucleic acid sequence that encodes the CH3 domain and comprises or consists of a sequence according to SEQ ID NO: 75.
[0867] Embodiment 31. The polyribonucleotide of embodiment 23 or 28, wherein the CH3 domain comprises or consists of an amino acid sequence according to SEQ ID NO: 77.
[0868] Embodiment 32. The polyribonucleotide of any one of embodiments 23, 28, and 31, wherein the polyribonucleotide comprises a ribonucleic acid sequence that encodes the CH3 domain and comprises or consists of a sequence according to SEQ ID NO: 78.
[0869] Embodiment 33. The polyribonucleotide of embodiment 23, wherein the CH3 domain comprises one or more substitution mutations, wherein the one or more substitution mutations comprise or consist of Y349C, T366S, L368A, Y407V, or a combination thereof, and wherein the substitution mutation positions are according to EU numbering.
[0870] Embodiment 34. The polyribonucleotide of embodiment 23, wherein the CH3 domain comprises one or more substitution mutations, wherein the one or more substitution mutations comprise or consist of Y349C, T366S, L368A, Y407V, M428L, N434S, or a combination thereof, and wherein the substitution mutation positions are according to EU numbering.
[0871] Embodiment 35. The polyribonucleotide of embodiment 23, wherein the CH3 domain comprises one or more substitution mutations, wherein the one or more substitution mutations comprise or consist of Y349C, T366S, L368A, Y407V, M428L, and N434S, and wherein the substitution mutation positions are according to EU numbering.
[0872] Embodiment 36. The polyribonucleotide of any one of embodiments 28 and 33-35, wherein the CH3 domain comprises or consists of an amino acid sequence according to SEQ ID NO: 80.
[0873] Embodiment 37. The polyribonucleotide of any one of embodiments 28 and 33-36, wherein the polyribonucleotide comprises a ribonucleic acid sequence that encodes the CH3 domain and comprises or consists of a sequence according to SEQ ID NO: 81.
[0874] Embodiment 38. The polyribonucleotide of any one of embodiments 28 and 33-35, wherein the CH3 domain comprises or consists of an amino acid sequence according to SEQ ID NO: 83.
[0875] Embodiment 39. The polyribonucleotide of any one of embodiments 28, 33-35, and 38, wherein the polyribonucleotide comprises a ribonucleic acid sequence that encodes the CH3 domain and comprises or consists of a sequence according to SEQ ID NO: 84.
[0876] Embodiment 40. The polyribonucleotide of embodiment 23, wherein the CH3 domain comprises one or more substitution mutations, wherein the one or more substitution mutations comprise or consist of S354C, T366W, or a combination thereof, and wherein the substitution mutation positions are according to EU numbering.
[0877] Embodiment 41. The polyribonucleotide of embodiment 23, wherein the CH3 domain comprises one or more substitution mutations, wherein the one or more substitution mutations comprise S354C, T366W, M428L, N434S, or a combination thereof, and wherein the substitution mutation positions are according to EU numbering.
[0878] Embodiment 42. The polyribonucleotide of embodiment 23, wherein the CH3 domain comprises one or more substitution mutations, wherein the one or more substitution mutations comprise S354C, T366W, M428L, and N434S, and wherein the substitution mutation positions are according to EU numbering.
[0879] Embodiment 43. The polyribonucleotide of any one of embodiments 28 and 40-42, wherein the CH3 domain comprises or consists of an amino acid sequence according to SEQ ID NO: 86.
[0880] Embodiment 44. The polyribonucleotide of any one of embodiments 28 and 40-43, wherein the polyribonucleotide comprises a ribonucleic acid sequence that encodes the CH3 domain and comprises or consists of a sequence according to SEQ ID NO: 87.
[0881] Embodiment 45. The polyribonucleotide of any one of embodiments 28 and 40-42, wherein the CH3 domain comprises or consists of an amino acid sequence according to SEQ ID NO: 89.
[0882] Embodiment 46. The polyribonucleotide of any one of embodiments 28, 40-42, and 45, wherein the polyribonucleotide comprises a ribonucleic acid sequence that encodes the CH3 domain and comprises or consists of a sequence according to SEQ ID NO: 90.
[0883] Embodiment 47. The polyribonucleotide of any one of embodiments 6-46, wherein the one or more constant domains comprise a hinge domain.
[0884] Embodiment 48. The polyribonucleotide of embodiment 47, wherein the hinge domain comprises or consists of an amino acid sequence according to SEQ ID NO: 104.
[0885] Embodiment 49. The polyribonucleotide of embodiment 47 or 48, wherein the polyribonucleotide comprises a ribonucleic acid sequence that encodes the hinge domain and comprises or consists of a sequence according to SEQ ID NO: 105.
[0886] Embodiment 50. The polyribonucleotide of embodiment 47, wherein the hinge domain comprises or consists of an amino acid sequence according to SEQ ID NO: 110.
[0887] Embodiment 51. The polyribonucleotide of embodiment 47 or 50, wherein the polyribonucleotide comprises a ribonucleic acid sequence that encodes the hinge domain and comprises or consists of a sequence according to SEQ ID NO: 111.
[0888] Embodiment 52. The polyribonucleotide of embodiment 47, wherein the hinge domain comprises or consists of an amino acid sequence according to SEQ ID NO: 107.
[0889] Embodiment 53. The polyribonucleotide of embodiment 47 or 52, wherein the polyribonucleotide comprises a ribonucleic acid sequence that encodes the hinge domain and comprises or consists of a sequence according to SEQ ID NO: 108.
[0890] Embodiment 54. The polyribonucleotide of any one of embodiments 6-53, wherein the one or more constant domains comprise a CH1 domain.
[0891] Embodiment 55. The polyribonucleotide of embodiment 54, wherein one or more constant domains comprise, in order, the CH1 domain, the hinge domain, the CH2 domain, and the CH3 domain.
[0892] Embodiment 56. The polyribonucleotide of embodiment 54 or 55, wherein the CH1 domain comprises or consists of an amino acid sequence according to SEQ ID NO: 38.
[0893] Embodiment 57. The polyribonucleotide of any one of embodiments 54-56, wherein the polyribonucleotide comprises a ribonucleic acid sequence that encodes the CH1 domain and comprises or consists of a sequence according to SEQ ID NO: 39.
[0894] Embodiment 58. The polyribonucleotide of embodiment 54 or 55, wherein the CH1 domain comprises or consists of an amino acid sequence according to SEQ ID NO: 41.
[0895] Embodiment 59. The polyribonucleotide of any one of embodiments 54-56, wherein the polyribonucleotide comprises a ribonucleic acid sequence that encodes the CH1 domain and comprises or consists of a sequence according to SEQ ID NO: 42.
[0896] Embodiment 60. The polyribonucleotide of embodiment 54 or 55, wherein the CH1 domain comprises one or more substitution mutations, wherein the one or more substitution mutations comprise or consist of K147E, K213D, or a combination thereof, and wherein the substitution mutation positions are according to EU numbering.
[0897] Embodiment 61. The polyribonucleotide of any one of embodiments 54, 55, and 60, wherein the CH1 domain comprises or consists of an amino acid sequence according to SEQ ID NO: 50.
[0898] Embodiment 62. The polyribonucleotide of any one of embodiments 54, 55, 60, and 61, wherein the polyribonucleotide comprises a ribonucleic acid sequence that encodes the CH1 domain and comprises or consists of a sequence according to SEQ ID NO: 51.
[0899] Embodiment 63. The polyribonucleotide of embodiment 54 or 55, wherein the immunoglobulin chain comprises or consists of an amino acid sequence according to SEQ ID NO: 614.
[0900] Embodiment 64. The polyribonucleotide of any one of embodiments 54, 55, and 63, wherein the polyribonucleotide comprises or consists of a ribonucleic acid sequence according to SEQ ID NO: 613.
[0901] Embodiment 65. The polyribonucleotide of embodiment 54 or 55, wherein the first immunoglobulin chain comprises or consists of an amino acid sequence according to SEQ ID NO: 617.
[0902] Embodiment 66. The polyribonucleotide of any one of embodiments 54, 55, and 65, wherein the polyribonucleotide comprises or consists of a ribonucleic acid sequence according to SEQ ID NO: 616.
[0903] Embodiment 67. The polyribonucleotide of embodiment 54 or 55, wherein the first immunoglobulin chain comprises or consists of an amino acid sequence according to SEQ ID NO: 623.
[0904] Embodiment 68. The polyribonucleotide of any one of embodiments 54, 55, and 67, wherein the polyribonucleotide comprises or consists of a ribonucleic acid sequence according to SEQ ID NO: 622.
[0905] Embodiment 69. The polyribonucleotide of embodiment 54 or 55, wherein the first immunoglobulin chain comprises or consists of an amino acid sequence according to SEQ ID NO: 626.
[0906] Embodiment 70. The polyribonucleotide of any one of embodiments 54, 55, and 69, wherein the polyribonucleotide comprises or consists of a ribonucleic acid sequence according to SEQ ID NO: 625.
[0907] Embodiment 71. The polyribonucleotide of embodiment 54 or 55, wherein the first immunoglobulin chain comprises or consists of an amino acid sequence according to SEQ ID NO: 635.
[0908] Embodiment 72. The polyribonucleotide of any one of embodiments 54, 55, and 71, wherein the polyribonucleotide comprises or consists of a ribonucleic acid sequence according to SEQ ID NO: 634.
[0909] Embodiment 73. The polyribonucleotide of embodiment 54 or 55, wherein the first immunoglobulin chain comprises or consists of an amino acid sequence according to SEQ ID NO: 641.
[0910] Embodiment 74. The polyribonucleotide of any one of embodiments 54, 55, and 73, wherein the polyribonucleotide comprises or consists of a ribonucleic acid sequence according to SEQ ID NO: 640.
[0911] Embodiment 75. The polyribonucleotide of embodiment 54 or 55, wherein the first immunoglobulin chain comprises or consists of an amino acid sequence according to SEQ ID NO: 644.
[0912] Embodiment 76. The polyribonucleotide of any one of embodiments 54, 55, and 75, wherein the polyribonucleotide comprises or consists of a ribonucleic acid sequence according to SEQ ID NO: 643.
[0913] Embodiment 77. The polyribonucleotide of embodiment 54 or 55, wherein the first immunoglobulin chain comprises or consists of an amino acid sequence according to SEQ ID NO: 647.
[0914] Embodiment 78. The polyribonucleotide of any one of embodiments 54, 55, and 77, wherein the polyribonucleotide comprises or consists of a ribonucleic acid sequence according to SEQ ID NO: 646.
[0915] Embodiment 79. The polyribonucleotide of embodiment 54 or 55, wherein the first immunoglobulin chain comprises or consists of an amino acid sequence according to SEQ ID NO: 650.
[0916] Embodiment 80. The polyribonucleotide of any one of embodiments 54, 55, and 79, wherein the polyribonucleotide comprises or consists of a ribonucleic acid sequence according to SEQ ID NO: 649.
[0917] Embodiment 81. The polyribonucleotide of embodiment 54 or 55, wherein the first immunoglobulin chain comprises or consists of an amino acid sequence according to SEQ ID NO: 653.
[0918] Embodiment 82. The polyribonucleotide of any one of embodiments 54, 55, and 81, wherein the polyribonucleotide comprises or consists of a ribonucleic acid sequence according to SEQ ID NO: 652.
[0919] Embodiment 83. The polyribonucleotide of any one of embodiments 6-53, wherein the one or more constant domains comprise a light chain constant (CL) domain.
[0920] Embodiment 84. The polyribonucleotide of embodiment 83, wherein one or more constant domains comprise, in order, the CL domain, the hinge domain, the CH₂ domain, and the CH3 domain.
[0921] Embodiment 85. The polyribonucleotide of embodiment 83 and 84, wherein the CL domain is a kappa constant domain.
[0922] Embodiment 86. The polyribonucleotide of any one of embodiments 83-85, wherein the CL domain comprises or consists of an amino acid sequence according to SEQ ID NO: 92.
[0923] Embodiment 87. The polyribonucleotide of any one of embodiments 83-86, wherein the polyribonucleotide comprises a ribonucleic acid sequence that encodes the light chain constant domain and comprises or consists of a sequence according to SEQ ID NO: 93.
[0924] Embodiment 88. The polyribonucleotide of any one of embodiments 83-85, wherein the CL domain comprises one or more substitution mutations, wherein the one or more substitution mutations comprise or consist of Q124E, and wherein the substitution mutation positions are according to EU numbering.
[0925] Embodiment 89. The polyribonucleotide of any one of embodiments 83-85, wherein the CL domain comprises one or more substitution mutations, wherein the one or more substitution mutations comprise or consist of R108A, T109S, or a combination thereof, and wherein the substitution mutation positions are according to EU numbering.
[0926] Embodiment 90. The polyribonucleotide of any one of embodiments 83-85, wherein the CL domain comprises one or more substitution mutations, wherein the one or more substitution mutations comprise or consist of R108A, T109S, Q124E or a combination thereof, and wherein the substitution mutation positions are according to EU numbering.
[0927] Embodiment 91. The polyribonucleotide of any one of embodiments 83-85 and 88, wherein the CL domain comprises or consists of an amino acid sequence according to SEQ ID NO: 95.
[0928] Embodiment 92. The polyribonucleotide of any one of embodiments 83-85, 88 and 91, wherein the polyribonucleotide comprises a ribonucleic acid sequence that encodes the light chain constant domain and comprises or consists of a sequence according to SEQ ID NO: 96.
[0929] Embodiment 93. The polyribonucleotide of embodiment 83 or 84, wherein the immunoglobulin chain comprises or consists of an amino acid sequence according to SEQ ID NO: 629.
[0930] Embodiment 94. The polyribonucleotide of any one of embodiments 83, 84, and 93, wherein the polyribonucleotide comprises or consists of a ribonucleic acid sequence according to SEQ ID NO: 628.
[0931] Embodiment 95. A polyribonucleotide encoding an immunoglobulin chain of an antibody agent, wherein the immunoglobulin chain comprises a light chain variable (VL) domain, and the VL domain comprises: (a) a light chain complementarity determining region (LCDR)1 comprising an amino acid sequence according to SEQ ID NO: 15; (b) an LCDR2 comprising an amino acid sequence according to SEQ ID NO: 18 (GTS); and (c) an LCDR3 comprising an amino acid sequence according to SEQ ID NO: 21.
[0932] Embodiment 96. The polyribonucleotide of embodiment 95, wherein the polyribonucleotide comprises a VL domain-encoding sequence, and wherein the VL domain-encoding sequence comprises: (a) an LCDR1-encoding sequence that comprises or consists of a ribonucleic acid sequence according to SEQ ID NO: 16; (b) an LCDR2-encoding sequence that comprises or consists of a ribonucleic acid sequence according to SEQ ID NO: 19 (GGCACCAGC); and
[0933] (c) an LCDR3-encoding sequence that comprises or consists of a ribonucleic acid sequence according to SEQ ID NO: 22.
[0934] Embodiment 97. The polyribonucleotide of embodiment 95 or 96, wherein the VL domain comprises or consists of an amino acid sequence according to SEQ ID NO: 29.
[0935] Embodiment 98. The polyribonucleotide of any one of embodiments 95-97, wherein the VL domain-encoding sequence comprises or consists of a ribonucleic acid sequence according to SEQ ID NO: 30.
[0936] Embodiment 99. The polyribonucleotide of any one of embodiments 95-98, wherein the immunoglobulin chain further comprises a CL domain, and wherein the VL domain is operably linked to the CL domain.
[0937] Embodiment 100. The polyribonucleotide of embodiment 99, wherein the CL domain is a kappa light chain constant domain.
[0938] Embodiment 101. The polyribonucleotide of embodiment 99 or 100, wherein the CL domain comprises or consists of an amino acid sequence according to SEQ ID NO: 92.
[0939] Embodiment 102. The polyribonucleotide of any one of embodiments 99-101, wherein the polyribonucleotide comprises a ribonucleic acid sequence that encodes the CL domain and comprises or consists of a sequence according to SEQ ID NO: 93.
[0940] Embodiment 103. The polyribonucleotide of embodiment 99 or 100, wherein the CL domain comprises one or more substitution mutations, wherein the one or more substitution mutations comprise or consist of E123K, Q124R, or a combination thereof, and wherein the substitution mutation positions are according to EU numbering.
[0941] Embodiment 104. The polyribonucleotide of any one of embodiments 99, 100, and 103, wherein the CL domain comprises or consists of an amino acid sequence according to SEQ ID NO: 98.
[0942] Embodiment 105. The polyribonucleotide of any one of embodiments 99, 100, 103, and 104, wherein the polyribonucleotide comprises a ribonucleic acid sequence that encodes the light chain constant domain and comprises or consists of a sequence according to SEQ ID NO: 99.
[0943] Embodiment 106. The polyribonucleotide of embodiment 99 or 100, wherein the CL domain comprises one or more substitution mutations, wherein the one or more substitution mutations comprise or consist of E123R, Q124K, or a combination thereof, and wherein the substitution mutation positions are according to EU numbering.
[0944] Embodiment 107. The polyribonucleotide of any one of embodiments 99, 100, and 106, wherein the CL domain comprises or consists of an amino acid sequence according to SEQ ID NO: 101.
[0945] Embodiment 108. The polyribonucleotide of any one of embodiments 99, 100, 106, and 107, wherein the polyribonucleotide comprises a ribonucleic acid sequence that encodes the light chain constant domain and comprises or consists of a sequence according to SEQ ID NO: 102.
[0946] Embodiment 109. The polyribonucleotide of embodiment 99 or 100, wherein the immunoglobulin chain comprises or consists of an amino acid sequence according to SEQ ID NO: 620.
[0947] Embodiment 110. The polyribonucleotide of any one of embodiments 99, 100, and 109, wherein the polyribonucleotide comprises or consists of a ribonucleic acid sequence according to SEQ ID NO: 619.
[0948] Embodiment 111. The polyribonucleotide of embodiment 99 or 100, wherein the immunoglobulin chain comprises or consists of an amino acid sequence according to SEQ ID NO: 638.
[0949] Embodiment 112. The polyribonucleotide of any one of embodiments 99, 100, and 111, wherein the polyribonucleotide comprises or consists of a ribonucleic acid sequence according to SEQ ID NO: 637.
[0950] Embodiment 113. The polyribonucleotide of embodiment 99 or 100, wherein the immunoglobulin chain comprises or consists of an amino acid sequence according to SEQ ID NO: 668.
[0951] Embodiment 114. The polyribonucleotide of any one of embodiments 99, 100, and 113, wherein the polyribonucleotide comprises or consists of a ribonucleic acid sequence according to SEQ ID NO: 667.
[0952] Embodiment 115. The polyribonucleotide of any one of embodiments 95-98, wherein the immunoglobulin chain further comprises a CH1 domain, and wherein the VL domain is operably linked to the CH1 domain.
[0953] Embodiment 116. The polyribonucleotide of embodiment 115, wherein the CH₁ domain comprises or consists of an amino acid sequence according to SEQ ID NO: 44.
[0954] Embodiment 117. The polyribonucleotide of embodiment 115 or 116, wherein the polyribonucleotide comprises a ribonucleic acid sequence that encodes the CH1 domain and comprises or consists of a sequence according to SEQ ID NO: 45.
[0955] Embodiment 118. The polyribonucleotide of embodiment 115, wherein the CH₁ domain comprises or consists of an amino acid sequence according to SEQ ID NO: 47.
[0956] Embodiment 119. The polyribonucleotide of embodiment 115 or 116, wherein the polyribonucleotide comprises a ribonucleic acid sequence that encodes the CH1 domain and comprises or consists of a sequence according to SEQ ID NO: 48.
[0957] Embodiment 120. The polyribonucleotide of embodiment 115, wherein the immunoglobulin chain comprises or consists of an amino acid sequence according to SEQ ID NO: 632.
[0958] Embodiment 121. The polyribonucleotide of embodiment 115 or 116, wherein the polyribonucleotide comprises or consists of a ribonucleic acid sequence according to SEQ ID NO: 631.
[0959] Embodiment 122. A polyribonucleotide encoding an immunoglobulin chain of an antibody agent, wherein the immunoglobulin chain comprises a heavy chain variable (VH) domain and a light chain variable (VL) domain, wherein the VH domain comprises: (a) an HCDR1 comprising an amino acid sequence according to SEQ ID NO: 6; (b) an HCDR2 comprising an amino acid sequence according to SEQ ID NO: 9; and (c) an HCDR3 comprising an amino acid sequence according to SEQ ID NO: 12; and wherein the VL domain comprises: (d) an LCDR1 comprising an amino acid sequence according to SEQ ID NO: 15; (e) an LCDR2 comprising an amino acid sequence according to SEQ ID NO: 18 (GTS); and (f) an LCDR3 comprising an amino acid sequence according to SEQ ID NO: 21.
[0960] Embodiment 123. The polyribonucleotide of embodiment 122, wherein the polyribonucleotide comprises a VH domain-encoding sequence and a VL domain-encoding sequence, wherein the VH domain-encoding sequence comprises: (a) an HCDR1-encoding sequence that comprises or consists of the ribonucleic acid sequence according to SEQ ID NO: 7; (b) the HCDR2-encoding sequence that comprises or consists of the ribonucleic acid sequence according to SEQ ID NO: 10; and (c) the HCDR3-encoding sequence that comprises or consists of the ribonucleic acid sequence according to SEQ ID NO: 13; and wherein the VL domain-encoding sequence comprises: (d) an LCDR1-encoding sequence that comprises or consists of a ribonucleic acid sequence according to SEQ ID NO: 16; (e) an LCDR2-encoding sequence that comprises or consists of a ribonucleic acid sequence according to SEQ ID NO: 19 (GGCACCAGC); and (f) an LCDR3-encoding sequence that comprises or consists of a ribonucleic acid sequence according to SEQ ID NO: 22.
[0961] Embodiment 124. The polyribonucleotide of embodiment 122 or 123, wherein the immunoglobulin chain comprises a single chain fragment variable (scFv), and the scFv comprises the VH domain, a linker, and the VL domain.
[0962] Embodiment 125. The polyribonucleotide of embodiment 124, wherein the scFv comprises, in order: (i) the VH domain comprising or consisting of an amino acid sequence according to SEQ ID NO: 24, (ii) the linker, and (iii) the VL domain comprising or consisting of an amino acid sequence according to SEQ ID NO: 29.
[0963] Embodiment 126. The polyribonucleotide of embodiment 124, wherein the scFv comprises, in order: (i) the VL domain comprising or consisting of an amino acid sequence according to SEQ ID NO: 29, (ii) the linker, and (iii) the VH domain comprising or consisting of an amino acid sequence according to SEQ ID NO: 24.
[0964] Embodiment 127. The polyribonucleotide of any one of embodiments 124-126, wherein the immunoglobulin chain comprises a hinge domain following the scFv.
[0965] Embodiment 128. The polyribonucleotide of embodiment 127, wherein the hinge domain comprises or consists of an amino acid sequence according to SEQ ID NO: 104.
[0966] Embodiment 129. The polyribonucleotide of embodiment 127 or 128, wherein the polyribonucleotide comprises a ribonucleic acid sequence that encodes the hinge domain and comprises or consists of a sequence according to SEQ ID NO: 105.
[0967] Embodiment 130. The polyribonucleotide of embodiment 127, wherein the hinge domain comprises or consists of an amino acid sequence according to SEQ ID NO: 110.
[0968] Embodiment 131. The polyribonucleotide of embodiment 127 or 130, wherein the polyribonucleotide comprises a ribonucleic acid sequence that encodes the hinge domain and comprises or consists of a sequence according to SEQ ID NO: 111.
[0969] Embodiment 132. The polyribonucleotide of embodiment 127, wherein the hinge domain comprises or consists of an amino acid sequence according to SEQ ID NO: 107.
[0970] Embodiment 133. The polyribonucleotide of embodiment 127 or 132, wherein the polyribonucleotide comprises a ribonucleic acid sequence that encodes the hinge domain and comprises or consists of a sequence according to SEQ ID NO: 108.
[0971] Embodiment 134. The polyribonucleotide of any one of embodiments 122-133, wherein the immunoglobulin chain comprises one or more constant domains, and wherein the scFv is operably linked to the one or more constant domains.
[0972] Embodiment 135. The polyribonucleotide of any one of embodiments 127-134, wherein the immunoglobulin chain comprises one or more constant domain, and the hinge domain is between the scFv and the one or more constant domains.
[0973] Embodiment 136. The polyribonucleotide of embodiment 134 or 135, wherein the one or more constant domains comprise a CH2 domain.
[0974] Embodiment 137. The polyribonucleotide of embodiment 136, wherein the CH2 domain comprises or consists of a sequence according to SEQ ID NO: 53.
[0975] Embodiment 138. The polyribonucleotide of embodiment 136 or 137, wherein the polyribonucleotide comprises a ribonucleic acid sequence that encodes the CH2 domain and comprises or consists of a sequence according to SEQ ID NO: 54.
[0976] Embodiment 139. The polyribonucleotide of embodiment 136, wherein the CH2 domain comprises one or more substitution mutations, wherein the one or more substitution mutations comprise or consist of G236A, A330L, I332E, or a combination thereof, and wherein the substitution mutation positions are according to EU numbering.
[0977] Embodiment 140. The polyribonucleotide of embodiment 136 or 139, wherein the CH2 domain comprises one or more substitution mutations, wherein the one or more substitution mutations comprise or consist of G236A, and wherein the substitution mutation positions are according to EU numbering.
[0978] Embodiment 141. The polyribonucleotide of embodiment 136 or 139, wherein the CH2 domain comprises one or more substitution mutations, wherein the one or more substitution mutations comprise or consist of I332E, and wherein the substitution mutation positions are according to EU numbering.
[0979] Embodiment 142. The polyribonucleotide of embodiment 136 or 139, wherein the CH2 domain comprises one or more substitution mutations, wherein the one or more substitution mutations comprise or consist of G236A and I332E, and wherein the substitution mutation positions are according to EU numbering.
[0980] Embodiment 143. The polyribonucleotide of embodiment 136 or 139, wherein the CH2 domain comprises one or more substitution mutations, wherein the one or more substitution mutations comprise or consist of G236A, A330L, and I332E, and wherein the substitution mutation positions are according to EU numbering.
[0981] Embodiment 144. The polyribonucleotide of any one of embodiments 136, 139, and 143, wherein the CH2 domain comprises or consists of an amino acid sequence according to SEQ ID NO: 56.
[0982] Embodiment 145. The polyribonucleotide of any one of embodiments 136, 139, 143, and 144, wherein the polyribonucleotide comprises a ribonucleic acid sequence that encodes the CH2 domain and comprises or consists of a sequence according to SEQ ID NO: 57.
[0983] Embodiment 146. The polyribonucleotide of any one of embodiments 136, 139, and 142, wherein the CH2 domain comprises or consists of an amino acid sequence according to SEQ ID NO: 59.
[0984] Embodiment 147. The polyribonucleotide of any one of embodiments 136, 139, 142 and 146, wherein the polyribonucleotide comprises a ribonucleic acid sequence that encodes the CH2 domain and comprises or consists of a sequence according to SEQ ID NO: 60.
[0985] Embodiment 148. The polyribonucleotide of any one of embodiments 136, 139, and 140, wherein the CH2 domain comprises or consists of an amino acid sequence according to SEQ ID NO: 62.
[0986] Embodiment 149. The polyribonucleotide of any one of embodiments 136, 139, 140, and 148, wherein the polyribonucleotide comprises a ribonucleic acid sequence that encodes the CH2 domain and comprises or consists of a sequence according to SEQ ID NO: 63.
[0987] Embodiment 150. The polyribonucleotide of any one of embodiments 136, 139, and 141, wherein the CH2 domain comprises or consists of an amino acid sequence according to SEQ ID NO: 65.
[0988] Embodiment 151. The polyribonucleotide of any one of embodiments 136, 139, 141, and 150, wherein the polyribonucleotide comprises a ribonucleic acid sequence that encodes the CH2 domain and comprises or consists of a sequence according to SEQ ID NO: 66.
[0989] Embodiment 152. The polyribonucleotide of any one of embodiments 134-151, wherein the one or more constant domains comprise a CH3 domain.
[0990] Embodiment 153. The polyribonucleotide of embodiment 152, wherein the CH3 domain comprises or consists of a sequence according to SEQ ID NO: 68.
[0991] Embodiment 154. The polyribonucleotide of embodiment 152 or 153, wherein the polyribonucleotide comprises a ribonucleic acid sequence that encodes the CH3 domain and comprises or consists of a sequence according to SEQ ID NO: 69.
[0992] Embodiment 155. The polyribonucleotide of embodiment 152, wherein the CH3 domain comprises or consists of an amino acid sequence according to SEQ ID NO: 71.
[0993] Embodiment 156. The polyribonucleotide of embodiment 152 or 155, wherein the polyribonucleotide comprises a ribonucleic acid sequence that encodes the CH3 domain and comprises or consists of a sequence according to SEQ ID NO: 72.
[0994] Embodiment 157. The polyribonucleotide of embodiment 152, wherein the CH3 domain comprises one or more substitution mutations, wherein the one or more substitution mutations comprise or consist of M428L, N434S, or a combination thereof, and wherein the substitution mutation positions are according to EU numbering.
[0995] Embodiment 158. The polyribonucleotide of embodiment 152 or 157, wherein the CH3 domain comprises or consists of an amino acid sequence according to SEQ ID NO: 74.
[0996] Embodiment 159 The polyribonucleotide of any one of embodiments 152, 157 and 158, wherein the polyribonucleotide comprises a ribonucleic acid sequence that encodes the CH3 domain and comprises or consists of a sequence according to SEQ ID NO: 75.
[0997] Embodiment 160. The polyribonucleotide of embodiment 152 or 157, wherein the CH3 domain comprises or consists of an amino acid sequence according to SEQ ID NO: 77,
[0998] Embodiment 161. The polyribonucleotide of any one of embodiments 152, 157 and 160, wherein the polyribonucleotide comprises a ribonucleic acid sequence that encodes the CH3 domain and comprises or consists of a sequence according to SEQ ID NO: 78.
[0999] Embodiment 162. The polyribonucleotide of embodiment 152, wherein the CH3 domain comprises one or more substitution mutations, wherein the one or more substitution mutations comprise or consist of Y349C, T366S, L368A, Y407V, or a combination thereof, and wherein the substitution mutation positions are according to EU numbering.
[1000] Embodiment 163. The polyribonucleotide of any one of embodiments 152, 157, and 162, wherein the CH3 domain comprises one or more substitution mutations, wherein the one or more substitution mutations comprise or consist of Y349C, T366S, L368A, Y407V, M428L, N434S, or a combination thereof, and wherein the substitution mutation positions are according to EU numbering.
[1001] Embodiment 164. The polyribonucleotide of any one of embodiments 152, 157, 162, and 163, wherein the CH3 domain comprises one or more substitution mutations, wherein the one or more substitution mutations comprise or consist of Y349C, T366S, L368A, Y407V, M428L, and N434S, and wherein the substitution mutation positions are according to EU numbering.
[1002] Embodiment 165. The polyribonucleotide of any one of embodiments 152, 157, and 162-164, wherein the CH3 domain comprises or consists of an amino acid sequence according to SEQ ID NO: 80.
[1003] Embodiment 166. The polyribonucleotide of any one of embodiments 152, 157, and 162-165, wherein the polyribonucleotide comprises a ribonucleic acid sequence that encodes the CH3 domain and comprises or consists of a sequence according to SEQ ID NO: 81.
[1004] Embodiment 167. The polyribonucleotide of any one of embodiments 152, 157, and 162-164, wherein the CH3 domain comprises or consists of an amino acid sequence according to SEQ ID NO: 83.
[1005] Embodiment 168. The polyribonucleotide of any one of embodiments 152, 157, 162-164, and 167, wherein the polyribonucleotide comprises a ribonucleic acid sequence that encodes the CH3 domain and comprises or consists of a sequence according to SEQ ID NO: 84.
[1006] Embodiment 169. The polyribonucleotide of embodiment 152, wherein the CH3 domain comprises one or more substitution mutations, wherein the one or more substitution mutations comprise or consist of S354C, T366W, or a combination thereof, and wherein the substitution mutation positions are according to EU numbering.
[1007] Embodiment 170. The polyribonucleotide of any one of embodiments 152, 157, and 169, wherein the CH3 domain comprises one or more substitution mutations, wherein the one or more substitution mutations comprise S354C, T366W, M428L, N434S, or a combination thereof, and wherein the substitution mutation positions are according to EU numbering.
[1008] Embodiment 171. The polyribonucleotide of any one of embodiments 152, 157, 169, and 170, wherein the CH3 domain comprises one or more substitution mutations, wherein the one or more substitution mutations comprise S354C, T366W, M428L, and N434S, and wherein the substitution mutation positions are according to EU numbering.
[1009] Embodiment 172. The polyribonucleotide of any one of embodiments 152, 157, and 169-171, wherein the CH3 domain comprises or consists of an amino acid sequence according to SEQ ID NO: 86.
[1010] Embodiment 173. The polyribonucleotide of any one of embodiments 152, 157, and 169-172, wherein the polyribonucleotide comprises a ribonucleic acid sequence that encodes the CH3 domain and comprises or consists of a sequence according to SEQ ID NO: 87.
[1011] Embodiment 174. The polyribonucleotide of any one of embodiments 152, 157, and 169-171, wherein the CH3 domain comprises or consists of an amino acid sequence according to SEQ ID NO: 89.
[1012] Embodiment 175. The polyribonucleotide of embodiment any one of embodiments 152, 157, 169-171, and 174, wherein the polyribonucleotide comprises a ribonucleic acid sequence that encodes the CH3 domain and comprises or consists of a sequence according to SEQ ID NO: 90.
[1013] Embodiment 176. The polyribonucleotide of any one of embodiments 125-175, wherein the linker comprises an amino acid sequence according to SEQ ID NO: 32.
[1014] Embodiment 177. The polyribonucleotide of any one of embodiments 125-176, wherein the polyribonucleotide comprises a ribonucleic acid sequence that encodes the linker and comprises or consists of a sequence according to SEQ ID NO: 33.
[1015] Embodiment 178. The polyribonucleotide of any one of embodiments 125-175, wherein the linker comprises an amino acid sequence according to SEQ ID NO: 35.
[1016] Embodiment 179. The polyribonucleotide of any one of embodiments 125-175 and 178, wherein the polyribonucleotide comprises a ribonucleic acid sequence that encodes the linker and comprises or consists of a sequence according to SEQ ID NO: 36.
[1017] Embodiment 180. The polyribonucleotide of embodiment 124, wherein the immunoglobulin chain comprises or consists of a sequence according to SEQ ID NO: 656.
[1018] Embodiment 181. The polyribonucleotide of embodiment 124 or 180, wherein the polyribonucleotide comprises or consists of a ribonucleic acid sequence according to SEQ ID NO: 655.
[1019] Embodiment 182. The polyribonucleotide of embodiment 124, wherein the immunoglobulin chain comprises or consists of a sequence according to SEQ ID NO: 659.
[1020] Embodiment 183. The polyribonucleotide of embodiment 124 or 182, wherein the polyribonucleotide comprises or consists of a ribonucleic acid sequence according to SEQ ID NO: 658.
[1021] Embodiment 184. The polyribonucleotide of embodiment 124, wherein the immunoglobulin chain comprises or consists of a sequence according to SEQ ID NO: 662.
[1022] Embodiment 185. The polyribonucleotide of embodiment 124 or 184, wherein the polyribonucleotide comprises or consists of a ribonucleic acid sequence according to SEQ ID NO: 661.
[1023] Embodiment 186. The polyribonucleotide of embodiment 124, wherein the immunoglobulin chain comprises or consists of a sequence according to SEQ ID NO: 665.
[1024] Embodiment 187. The polyribonucleotide of embodiment 124 or 185, wherein the polyribonucleotide comprises or consists of a ribonucleic acid sequence according to SEQ ID NO: 664.
[1025] Embodiment 188. The polyribonucleotide of any one of embodiments 1-187, wherein the polyribonucleotide comprises a ribonucleic acid sequence encoding a secretion signal.
[1026] Embodiment 189. The polyribonucleotide of embodiment 188, wherein the secretion signal comprises a ribonucleic acid sequence according to SEQ ID NO: 2 or SEQ ID NO: 4.
[1027] Embodiment 190. The polyribonucleotide of any one of embodiments 1-189, wherein the polyribonucleotide comprises one or more non-coding sequence elements.
[1028] Embodiment 191. The polyribonucleotide of embodiment 190, wherein the one or more non-coding sequence elements enhances RNA stability and/or translation efficiency.
[1029] Embodiment 192. The polyribonucleotide of embodiment 190 or 191, wherein the one or more non-coding sequence elements comprise a 3′ untranslated region (UTR), a 5′ UTR, a 5′-cap, a polyadenine (polyA) tail, or combination thereof.
[1030] Embodiment 193. The polyribonucleotide of embodiment 192, wherein the polyA tail is or comprises a modified polyA sequence, preferably an interrupted polyA tail.
[1031] Embodiment 194. The polyribonucleotide of embodiment 193, wherein the polyA tail comprises or consists of a sequence that is at least 90% identical to SEQ ID NO: 474.
[1032] Embodiment 195. The polyribonucleotide of any one of embodiments 192-194, wherein the 3′ UTR comprises or consists of a nucleic acid sequence that is at least 90% identical to SEQ ID NO: 473.
[1033] Embodiment 196. The polyribonucleotide of any one of embodiments 192-195, wherein the 5′ UTR comprises or consists of a nucleic acid sequence that is at least 90% identical to SEQ ID NO: 472.
[1034] Embodiment 197. The polyribonucleotide of any one of embodiments 192-196, wherein the 5′-cap is (m₂^{7,3′-O})Gppp(m^{2′-O})ApG.
[1035] Embodiment 198. The polyribonucleotide of any one of embodiments 1-197, wherein the polyribonucleotide comprises one or more modified ribonucleotides.
[1036] Embodiment 199. The polyribonucleotide of embodiment 198, wherein the one or more modified ribonucleotides comprise pseudouridine.
[1037] Embodiment 200. The polyribonucleotide of any one of embodiments 1-5, 95-98 and 122-126, wherein the immunoglobulin chain further comprises: (a) a CH1 domain, a CH2 domain, and a CH3 domain, (b) a CL domain, a CH2 domain, and a CH3 domain, (c) a CL domain, or (d) a CH1 domain, and wherein: (i) the polyribonucleotide comprises a ribonucleic acid sequence that encodes a CH2 domain, and the CH2 domain comprises one or more substitution mutations, wherein the one or more substitution mutations comprise or consist of G236A, A330L, I332E, or a combination thereof, (ii) the polyribonucleotide comprises a ribonucleic acid sequence that encodes a CH3 domain, and the CH3 domain comprises one or more substitution mutations, wherein the one or more substitution mutations comprise or consist of Y349C, S354C, T366S, T366W, L368A, Y407V, M428L, N434S, or a combination thereof, (iii) the polyribonucleotide comprises a ribonucleic acid sequence that encodes a CH1 domain, and the CH1 domain comprises one or more substitution mutations, wherein the one or more substitution mutations comprise or consist of K147E, K213D, or a combination thereof, (iv) the polyribonucleotide comprises a ribonucleic acid sequence that encodes a CL domain, and the CL domain comprises one or more substitution mutations, wherein the one or more substitution mutations comprise or consist of R108A, T109S, E123K, E123R, Q124E, Q124K, Q124R, or a combination thereof, or (v) a combination thereof; wherein the substitution mutation positions are according to EU numbering.
[1038] Embodiment 201. The polyribonucleotide of any one of embodiments 1-4, wherein the polyribonucleotide comprises or consists of a ribonucleic acid sequence according to SEQ ID NO: 454.
[1039] Embodiment 202. The polyribonucleotide of any one of embodiments 1-4, wherein the polyribonucleotide comprises or consists of a ribonucleic acid sequence according to SEQ ID NO: 455.
[1040] Embodiment 203. The polyribonucleotide of any one of embodiments 1-4, wherein the polyribonucleotide comprises or consists of a ribonucleic acid sequence according to SEQ ID NO: 457.
[1041] Embodiment 204. The polyribonucleotide of any one of embodiments 1-4, wherein the polyribonucleotide comprises or consists of a ribonucleic acid sequence according to SEQ ID NO: 456.
[1042] Embodiment 205. The polyribonucleotide of any one of embodiments 1-4, wherein the polyribonucleotide comprises or consists of a ribonucleic acid sequence according to SEQ ID NO: 461.
[1043] Embodiment 206. The polyribonucleotide of any one of embodiments 1-4, wherein the polyribonucleotide comprises or consists of a ribonucleic acid sequence according to SEQ ID NO: 463.
[1044] Embodiment 207. The polyribonucleotide of any one of embodiments 1-4, wherein the polyribonucleotide comprises or consists of a ribonucleic acid sequence according to SEQ ID NO: 465.
[1045] Embodiment 208. The polyribonucleotide of any one of embodiments 1-4, wherein the polyribonucleotide comprises or consists of a ribonucleic acid sequence according to SEQ ID NO: 462.
[1046] Embodiment 209. The polyribonucleotide of any one of embodiments 1-4, wherein the polyribonucleotide comprises or consists of a ribonucleic acid sequence according to SEQ ID NO: 464.
[1047] Embodiment 210. The polyribonucleotide of any one of embodiments 1-4, wherein the polyribonucleotide comprises or consists of a ribonucleic acid sequence according to SEQ ID NO: 466.
[1048] Embodiment 211. The polyribonucleotide of any one of embodiments 1-4, wherein the polyribonucleotide comprises or consists of a ribonucleic acid sequence according to SEQ ID NO: 459.
[1049] Embodiment 212. The polyribonucleotide of any one of embodiments 95-98, wherein the polyribonucleotide comprises or consists of a ribonucleic acid sequence according to SEQ ID NO: 458.
[1050] Embodiment 213. The polyribonucleotide of any one of embodiments 95-98, wherein the polyribonucleotide comprises or consists of a ribonucleic acid sequence according to SEQ ID NO: 467.
[1051] Embodiment 214. The polyribonucleotide of any one of embodiments 95-98, wherein the polyribonucleotide comprises or consists of a ribonucleic acid sequence according to SEQ ID NO: 460.
[1052] Embodiment 215. The polyribonucleotide of any one of embodiments 122-126, wherein the polyribonucleotide comprises or consists of a ribonucleic acid sequence according to SEQ ID NO: 468.
[1053] Embodiment 216. The polyribonucleotide of any one of embodiments 122-126, wherein the polyribonucleotide comprises or consists of a ribonucleic acid sequence according to SEQ ID NO: 470.
[1054] Embodiment 217. The polyribonucleotide of any one of embodiments 122-126, wherein the polyribonucleotide comprises or consists of a ribonucleic acid sequence according to SEQ ID NO: 469.
[1055] Embodiment 218. The polyribonucleotide of any one of embodiments 122-126, wherein the polyribonucleotide comprises or consists of a ribonucleic acid sequence according to SEQ ID NO: 471.
[1056] Embodiment 219. A polyribonucleotide comprising or consisting of a ribonucleic acid sequence according to any one of SEQ ID NO: 669-864.
[1057] Embodiment 220. The polyribonucleotide of any one of embodiments 1-219, wherein the polyribonucleotide is a non-natural polyribonucleotide.
[1058] Embodiment 221. The polyribonucleotide of any one of embodiments 1-220, wherein the polyribonucleotide is an engineered polyribonucleotide.
[1059] Embodiment 222. The polyribonucleotide of any one of embodiments 1-221, wherein the polyribonucleotide is an isolated polyribonucleotide.
[1060] Embodiment 223. A plurality of polyribonucleotides comprising three or more different polyribonucleotides, wherein each polyribonucleotide of the three or more different polyribonucleotides encodes an immunoglobulin chain, wherein each of the three or more different polyribonucleotides encode a different immunoglobulin chain, wherein at least one of the polyribonucleotides of the plurality is a polyribonucleotide of any one of embodiments 1-222, and wherein, when immunoglobulin chains are expressed from the three or more different polyribonucleotides in a cell, the immunoglobulin chains form: (a) at least two different antibody agents; and (b) at most (2×+n+1)/2 different antibody agents, wherein x is equal to the number of polyribonucleotides in the three or more polyribonucleotides that encode an immunoglobulin chain comprising an scFv, and n is equal to the number of polyribonucleotides in the three or more polyribonucleotides minus x.
[1061] Embodiment 224. A composition comprising one or more polyribonucleotides of any one of embodiments 1-222.
[1062] Embodiment 225. The composition of embodiment 224, wherein the one or more polyribonucleotides comprise or consist of: (a) the polyribonucleotide of embodiment 63 or 64; and (b) the polyribonucleotide of embodiment 109 or 110.
[1063] Embodiment 226. The composition of embodiment 224, wherein the one or more polyribonucleotides comprise or consist of: (a) the polyribonucleotide of embodiment 65 or 66; and (b) the polyribonucleotide of embodiment 109 or 110.
[1064] Embodiment 227. The composition of embodiment 224, wherein the one or more polyribonucleotides comprise or consist of: (a) the polyribonucleotide of embodiment 67 or 68; and (b) the polyribonucleotide of embodiment 109 or 110.
[1065] Embodiment 228. The composition of embodiment 224, wherein the one or more polyribonucleotides comprise or consist of: (a) the polyribonucleotide of embodiment 69 or 70; and (b) the polyribonucleotide of embodiment 109 or 110.
[1066] Embodiment 229. The composition of embodiment 224, wherein the one or more polyribonucleotides comprise or consist of: (a) the polyribonucleotide of embodiment 71 or 72; and (b) the polyribonucleotide of embodiment 111 or 112.
[1067] Embodiment 230. The composition of embodiment 224, wherein the one or more polyribonucleotides comprise or consist of: (a) the polyribonucleotide of embodiment 73 or 74; and (b) the polyribonucleotide of embodiment 111 or 112.
[1068] Embodiment 231. The composition of embodiment 224, wherein the one or more polyribonucleotides comprise or consist of: (a) the polyribonucleotide of embodiment 75 or 76; and (b) the polyribonucleotide of embodiment 111 or 112.
[1069] Embodiment 232. The composition of embodiment 224, wherein the one or more polyribonucleotides comprise or consist of: (a) the polyribonucleotide of embodiment 77 or 78; and (b) the polyribonucleotide of embodiment 111 or 112.
[1070] Embodiment 233. The composition of embodiment 224, wherein the one or more polyribonucleotides comprise or consist of: (a) the polyribonucleotide of embodiment 79 or 80; and (b) the polyribonucleotide of embodiment 111 or 112.
[1071] Embodiment 234. The composition of embodiment 224, wherein the one or more polyribonucleotides comprise or consist of: (a) the polyribonucleotide of embodiment 81 or 82; and (b) the polyribonucleotide of embodiment 111 or 112.
[1072] Embodiment 235. The composition of embodiment 224, wherein the one or more polyribonucleotides comprise or consist of: (a) the polyribonucleotide of embodiment 71 or 72; and (b) the polyribonucleotide of embodiment 113 or 114.
[1073] Embodiment 236. The composition of embodiment 224, wherein the one or more polyribonucleotides comprise or consist of: (a) the polyribonucleotide of embodiment 73 or 74; and (b) the polyribonucleotide of embodiment 113 or 114.
[1074] Embodiment 237. The composition of embodiment 224, wherein the one or more polyribonucleotides comprise or consist of: (a) the polyribonucleotide of embodiment 75 or 76; and (b) the polyribonucleotide of embodiment 113 or 114.
[1075] Embodiment 238. The composition of embodiment 224, wherein the one or more polyribonucleotides comprise or consist of: (a) the polyribonucleotide of embodiment 77 or 78; and (b) the polyribonucleotide of embodiment 113 or 114.
[1076] Embodiment 239. The composition of embodiment 224, wherein the one or more polyribonucleotides comprise or consist of: (a) the polyribonucleotide of embodiment 79 or 80; and (b) the polyribonucleotide of embodiment 113 or 114.
[1077] Embodiment 240. The composition of embodiment 224, wherein the one or more polyribonucleotides comprise or consist of: (a) the polyribonucleotide of embodiment 81 or 82; and (b) the polyribonucleotide of embodiment 113 or 114.
[1078] Embodiment 241. The composition of embodiment 224, wherein the one or more polyribonucleotides comprise or consist of: (a) the polyribonucleotide of embodiment 93 or 94; and (b) the polyribonucleotide of embodiment 120 or 121.
[1079] Embodiment 242. The composition of any one of embodiments 227-241, wherein the composition further comprises lipid nanoparticles, polyplexes (PLX), lipidated polyplexes (LPLX), or liposomes, wherein the one or more polyribonucleotides are fully or partially encapsulated within the lipid nanoparticles, polyplexes (PLX), lipidated polyplexes (LPLX), or liposomes.
[1080] Embodiment 243. The composition of any one of embodiments 227-242, wherein the composition further comprises lipid nanoparticles, wherein the one or more polyribonucleotides are encapsulated within the lipid nanoparticles.
[1081] Embodiment 244. The composition of embodiment 243, wherein the lipid nanoparticles target liver cells.
[1082] Embodiment 245. The composition of embodiment 243, wherein the lipid nanoparticles target secondary lymphoid organ cells.
[1083] Embodiment 246. The composition of embodiment 243, wherein the lipid nanoparticles target lung cells.
[1084] Embodiment 247. The composition of embodiment any one of embodiments 242-246, wherein the lipid nanoparticles are cationic lipid nanoparticles.
[1085] Embodiment 248. The composition of any one of embodiments 242-247, wherein the lipid nanoparticles each comprise: (a) a polymer-conjugated lipid; (b) a cationic lipid; and (c) one or more neutral lipids.
[1086] Embodiment 249. The composition of embodiment 248, wherein the polymer-conjugated lipid comprises a PEG-conjugated lipid.
[1087] Embodiment 250. The composition of embodiment 248 or 249, wherein the polymer-conjugated lipid comprises 2-[(polyethylene glycol)-2000]-N,N-ditetradecylacetamide.
[1088] Embodiment 251. The composition of any one of embodiments 248-250, wherein the one or more neutral lipids comprise 1,2-Distearoyl-sn-glycero-3-phosphocholine (DPSC).
[1089] Embodiment 252. The composition of any one of embodiments 248-251, wherein the one or more neutral lipids comprise cholesterol.
[1090] Embodiment 253. The composition of any one of embodiments 248-252, wherein the cationic lipid comprises ((3-hydroxypropyl)azanediyl)bis(nonane-9,1-diyl) bis(2-butyloctanoate).
[1091] Embodiment 254. The composition of any one of embodiments 248-253, wherein the lipid nanoparticles each comprise: (a) 2-[(polyethylene glycol)-2000]-N,N-ditetradecylacetamide; (b) DPSC; (c) cholesterol; and (d) ((3-hydroxypropyl)azanediyl)bis(nonane-9,1-diyl) bis(2-butyloctanoate).
[1092] Embodiment 255. The composition of any one of embodiments 248-254, wherein the lipid nanoparticles comprise: (a) the polymer-conjugated lipid at about 1-2.5 mol % of the total lipids; (b) the cationic lipid at 35-65 mol % of the total lipids; and (c) the one or more neutral lipids are present in 35-65 mol % of the total lipids.
[1093] Embodiment 256. The composition of any one of embodiments 242-255, wherein the lipid nanoparticles have an average diameter of about 50-150 nm.
[1094] Embodiment 257. A pharmaceutical composition comprising the composition of any one of embodiments 224-256 and at least one pharmaceutically acceptable excipient.
[1095] Embodiment 258. The pharmaceutical composition of embodiment 257, wherein the pharmaceutical comprises a cryoprotectant.
[1096] Embodiment 259. The pharmaceutical composition of embodiment 257 or 258, wherein the pharmaceutical comprises an aqueous buffered solution.
[1097] Embodiment 260. A method comprising administering the pharmaceutical composition of any one of embodiments 257-259 to a subject.
[1098] Embodiment 261. The pharmaceutical composition of any one of embodiments 257-259 for use in the treatment of HIV comprising administering the pharmaceutical composition to a subject.
[1099] Embodiment 262. The pharmaceutical composition of any one of embodiments 257-259 for use in the prevention of HIV comprising administering the pharmaceutical composition to a subject.
[1100] Embodiment 263. The method of embodiment 260 or the pharmaceutical composition for use according to embodiment 261 or 262, wherein administering the pharmaceutical composition to the subject results in expression in the subject of: (a) the immunoglobulin chain of antibody agent; (b) the antibody agent; or (c) both.
[1101] Embodiment 264. The method of embodiment 260 or 263 or the pharmaceutical composition for use according to any one of embodiments 261-263, wherein the immunoglobulin chain of antibody agent, the antibody agent, or both is expressed in the subject at a titer of: (a) at least 1 μg/ml in plasma; or (b) at least 1 μg/ml in serum.
[1102] Embodiment 265. The method of any one of embodiments 260, 263, and 264 or the pharmaceutical composition for use according to any one of embodiments 261-264, wherein the antibody agent exhibits a geometric mean IC50 of five neutralized strains of less than 0.3 g/ml against the neutralized strains of a global reference panel when tested in the TZM-bl cell pseudovirus neutralization assay at antibody agent concentrations up to 25 g/ml.
[1103] Embodiment 266. The method of any one of embodiments 260 and 263-265 or the pharmaceutical composition for use according to any one of embodiments 261-265, wherein the antibody agent is capable of neutralizing one or more HIV strains when tested in the TZM-bl cell pseudovirus neutralization assay at antibody agent concentrations up to 25 g/ml.
[1104] Embodiment 267. The method of any one of embodiments 260 and 263-266 or the pharmaceutical composition for use according to any one of embodiments 261-266, wherein the antibody agent is capable of neutralizing one or more HIV strains at a level that is within 3-fold of a level of an equivalent amount of recombinant benchmark antibody.
[1105] Embodiment 268. The method or the pharmaceutical composition for use of embodiment 267, wherein the recombinant benchmark antibody is an unmodified wild-type IgG antibody comprising the same HCDR1, HCDR2, HCDR2, LCDR1, LCDR2, and LCDR3 as the antibody agent.
[1106] Embodiment 269. The method of any one of embodiments 260 and 263-268 or the pharmaceutical for use according to any one of embodiments 261-268, wherein administering the pharmaceutical composition to the subject comprises administering one or more doses of the pharmaceutical composition to the subject.
[1107] Embodiment 270. The method or the pharmaceutical composition for use of embodiment 269, wherein the one or more doses of the pharmaceutical composition are administered to the subject weekly.
[1108] Embodiment 271. The method or the pharmaceutical composition for use of embodiment 269, wherein the one or more doses of the pharmaceutical composition are administered to the subject bi-weekly.
[1109] Embodiment 272. The method of any one of embodiments 260 and 263-271 or the pharmaceutical composition for use according to any one of embodiments 261-271, wherein the pharmaceutical composition is administered intravenously.
[1110] Embodiment 273. The method of any one of embodiments 260 and 263-271 or the pharmaceutical composition for use according to any one of embodiments 261-271, wherein the pharmaceutical composition is administered intramuscularly.
[1111] Embodiment 274. The method of any one of embodiments 260 and 263-271 or the pharmaceutical composition for use according to any one of embodiments 261-271, wherein the pharmaceutical composition is administered subcutaneously.
[1112] Embodiment 275. The method of any one of embodiments 260 and 263-274 or the pharmaceutical composition for use according to any one of embodiments 261-274, wherein the subject has or is at risk of developing an HIV infection.
[1113] Embodiment 276. The method of any one of embodiments 260 and 263-275, wherein the method is a method of treating an HIV infection.
[1114] Embodiment 277. The method of any one of embodiments 260 and 263-275, wherein the method is a method of preventing an HIV infection.
[1115] Embodiment 278. Use of the composition of any one of embodiments 224-256 or the pharmaceutical composition of any one of embodiments 257-259 for the treatment of HIV in a subject.
[1116] Embodiment 279. Use of the composition of any one of embodiments 224-256 or the pharmaceutical composition of any one of embodiments 257-259 for the prevention of HIV in a subject.
[1117] Embodiment 280. The use of embodiment 278 or 279, wherein the subject has or is at risk of developing an HIV infection.
[1118] Embodiment 281. A method of producing an antibody agent comprising administering to cells the composition of any one of embodiments 224-256 or the pharmaceutical composition of any one of embodiments 257-259 so that the cells express and secrete the antibody agent.
[1119] Embodiment 282. The method of embodiment 281, wherein the cells are liver cells.
[1120] Embodiment 283. The method of embodiment 281 or 282, wherein the cells are in a subject.
[1121] Embodiment 284. The method of embodiment 281 or 282, wherein the cells are ex vivo cells.
[1122] Embodiment 285. The method of embodiment 283, wherein the antibody agent is produced at a therapeutically relevant plasma concentration or a therapeutically relevant serum concentration.
[1123] Embodiment 286. The method of embodiment 285, wherein the therapeutically relevant plasma concentration or the therapeutically relevant serum concentration is at least 1 μg/ml.
[1124] Embodiment 287. A method comprising a step of: determining one or more features of an antibody agent expressed from the polyribonucleotide of any one of embodiments 1-222, the composition of any one of embodiments 224-256, or the pharmaceutical composition of any one of embodiments 257-259 introduced into cells, wherein the one or more features comprises: (i) protein expression level of the antibody agent; (ii) binding specificity of the antibody agent to the CD4 binding site of HIV; (iii) efficacy of the antibody agent to mediate targeted cell death through antibody-dependent cellular cytotoxicity (ADCC); and (iv) efficacy of the antibody agent to mediate target cell death through complement dependent cytotoxicity (CDC).
[1125] Embodiment 288. A method comprising the steps of: contacting cells with the polyribonucleotide of any one of embodiments 1-222, the composition of any one of embodiments 224-256, or the pharmaceutical composition of any one of embodiments 257-259 introduced into cells; and detecting the antibody agent produced by the cells.
[1126] Embodiment 289. The method of embodiment 287, the method further comprising steps of: contacting cells with the polyribonucleotide of any one of embodiments 1-222, the composition of any one of embodiments 224-256, or the pharmaceutical composition of any one of embodiments 257-259 introduced into cells; and detecting the antibody agent produced by the cells.
[1127] Embodiment 290. The method of embodiment 288 or 289, wherein the cells are liver cells.
[1128] Embodiment 291. The method of any one of embodiments 287-290, wherein the step of determining comprises comparing the one or more features of the antibody agent with that of a reference antibody that specifically binds to a CD4 binding site of HIV.
[1129] Embodiment 292. The method of any one of embodiments 287-291, wherein the step of determining comprises assessing the protein expression level of the antibody agent above a threshold level.
[1130] Embodiment 293. The method of embodiment 292, wherein the threshold level is a level that is sufficient to induce ADCC.
[1131] Embodiment 294. The method of any one of embodiments 287-293, wherein the step of determining comprises assessing binding of the antibody agent to a CD4 binding site of HIV.
[1132] Embodiment 295. The method of any one of embodiments 287-294, wherein the step of determining comprises assessing the antibody agent in the TZM-bl cell pseudovirus neutralization assay at antibody agent concentrations up to 25 g/ml
[1133] Embodiment 296. The method of any one of embodiments 287-295, wherein the cells are present in a subject.
[1134] Embodiment 297. The method of any one of embodiments 287-295, wherein the cells are ex vivo cells.
[1135] Embodiment 298. The method of embodiment 296, wherein the one or more features include antibody level in one or more tissues in the subject.
[1136] Embodiment 299. A method of manufacture, the method comprising steps of: (a) determining one or more features of a polyribonucleotide of any one of embodiments 1-222, the composition of any one of embodiments 224-256, or the pharmaceutical composition of any one of embodiments 257-259, which one or more features comprise or consist of: (i) length and/or sequence of the polyribonucleotide; (ii) integrity of the polyribonucleotide; (iii) presence and/or location of one or more chemical moieties of the polyribonucleotide; (iv) extent of expression of the antibody agent when the polyribonucleotide is introduced into a cell; (v) stability of the polyribonucleotide or composition thereof; (vi) level of antibody agent in a biological sample from an organism into which the polyribonucleotide has been introduced; (vii) binding specificity of the antibody agent expressed from the polyribonucleotide, optionally to a CD4 binding site of HIV; (viii) efficacy of the antibody agent to mediate target cell death through ADCC; (ix) efficacy of the antibody agent to mediate target cell death through complement dependent cytotoxicity (CDC); (x) lipid identity and amount/concentration within the composition; (xi) size of lipid nanoparticles within the composition; (xii) polydispersity of lipid nanoparticles within the composition; (xiii) amount/concentration of the polyribonucleotide within the composition; (xiv) extent of encapsulation of the polyribonucleotide within lipid nanoparticles; (xv) a level of double stranded RNA; and (xvi) combinations thereof; (B) comparing the one or more features of the polyribonucleotide with that of an appropriate reference standard; and (C) (i) designating the polyribonucleotide or composition thereof for one or more further steps of manufacturing and/or distribution if the comparison demonstrates that the polyribonucleotide or composition thereof meets or exceeds the reference standard; or (ii) taking an alternative action if the comparison demonstrates that the polyribonucleotide or composition thereof does not meet or exceed the reference standard.
[1137] Embodiment 300. The method of embodiment 299, wherein the polyribonucleotide is assessed and the one or more further steps of step (C) (i) are or comprise at least formulation of the polyribonucleotide.
[1138] Embodiment 301. The method of embodiment 299 or 300, wherein the composition or the pharmaceutical composition is assessed, and the one or more further steps of step (C) (i) are or comprise release and distribution of the composition or the pharmaceutical composition.

### EXEMPLIFICATION

### Example 1: Selection of Exemplary Antibody Agents

[1139] The present Example demonstrates exemplary antibody agents specific for HIV that can be selected to be expressed (alone or in combination) from one or more polyribonucleotides, and formulations comprising said polyribonucleotides encoding antibody agent(s). This Example also provides methods by which specific antibody agents can be selected to be encoded by one or more polyribonucleotides, wherein the one or more polyribonucleotides can be used in a composition, e.g., for administration as a therapeutic for treatment or prevention of HIV.

[1140] As discussed herein, HIV has an extremely high mutational rate, which enables HIV to evade a subject's immune response, as well as treatments targeting certain epitopes. Thus, an antibody agent must be able to target a breadth of HIV polypeptides and/or polypeptide variants. Antibody agents selected herein are chosen for their ability to target a sufficient number of HIV polypeptides and/or polypeptide variants at a relatively low concentration to control viremia and clear infected cells. Antibody agents selected herein can be used alone, but also can be used in combination to increase the breadth of HIV polypeptides and/or polypeptide variants it is able to target.

[1141] The broadly neutralizing antibody (bNAb) “1-18” was identified as a candidate for further experiments alone or in combination with other bNAbs. Schommers, P., et al., “Restriction of HIV-1 Escape by a Highly Broad and Potent Neutralizing Antibody,” Cell, 2020 Feb. 6; 180(3):471-489.e22 (Jan. 30, 2020), which is incorporated herein by reference in its entirety. As discussed herein, 1-18 was a natural antibody isolated from an HIV subject. It has been reported that, as compared with 3BNC117 and VRC01, the two most clinically advanced CD4bs-targeting bNAbs to date, 1-18 effectively restricts viral escape and maintains both neutralizing activity against VRC01-class escape variants and full viral suppression when tested in HIV-1_{YU2}-infected humanized mice. Additionally, 1-18 is able to neutralize a wide variety of HIV strains and has demonstrated a high degree of potency in multi-HIV strain panels.

[1142] Because 1-18 has been able to outperform other anti-HIV antibodies, 1-18 was selected for further assessment, including modification of its antibody format to permit administration of polyribonucleotides encoding an antibody agent having at least the 1-18 variable domains, particularly when administered with polyribonucleotides encoding other anti-HIV antibody agents. Development of polyribonucleotides encoding 1-18 antibody agents was also performed, as described herein.

[1143] Combinations of antibody agents comprising 1-18 were also assessed. As discussed herein, the present disclosure provides the insight that administering polyribonucleotides encoding multiple anti-HIV antibody agents can be a particularly powerful approach for broadly neutralizing a number of HIV strains and for minimizing evasion of the antibody agents by HIV variants. Accordingly, combinations including 1-18 with other antibody agents were tested for potency. Selection of additional antibody agents for use in combination with 1-18 was assessed using Combinaber, an online tool based on Bliss-Hill combination prediction model on an HIV global panel (Wagh et al., Plos Path 2016). (https://www.hiv.lanl.gov/content/sequence/COMBINABER/combinaber.html). In order apply the Bliss-Hill model, the IC80 values at <0.1 μg/ml, <1 μg/ml and <10 μg/ml of the antibody agents (here, bNAbs) were determined. Data from the exemplary combinations of bNAbs with 1-18 are shown in the Table 9 below.

TABLE 9
IC80 data obtained with various combinations including 1-18 and other antibody agents.

| | | % Coverage at (overall Rank*) | | | | | |
|---|---|---|---|---|---|---|---|
| | | IC80 <0.1 μg/ml | | IC80 <1 μg/ml | | IC80 <10 μ′g/ml | |
| 2 bNAb | 1-18 + bNAb002 | 61.24% | (2) | 91.01% | (2) | 97.19% | (2) |
| 3 bNAb | 1-18 + bNAb002 + bNAb003 | 69.66% | (5) | 98.31% | (1) | 100.00% | (6) |
| | 1-18 + bNAb002 + bNAb004 | 70.22% | (6) | 96.63% | (12) | 99.44% | (11) |
| | 1-18 + bNAb002 + bNAb005 | 68.54% | (11) | 96.07% | (9) | 99.44% | (4) |
| 4 bNAb | 1-18 + bNAb002 + bNAb005 + bNAb003 | 79.78% | (10) | 100.00% | (5) | 100.00% | (10) |
| | 1-18 + bNAb002 + bNAb005 + bNAb004 | 78.65% | (13) | 99.43% | (9) | 100.00% | (14) |

[1144] This data confirms that 1-18, while having excellent breadth and potency, can be used with other anti-HIV antibody agents to further increase breadth and potency that can be achieved by a pharmaceutical composition.

### Example 2: Generation of Polyribonucleotides Encoding 1-18 IgG Antibody Agents

[1145] The present Example demonstrates the generation of polyribonucleotide sequences encoding an anti-HIV antibody agent. The present Example further demonstrates that such polyribonucleotides can be designed so that transient in vivo antibody agent production following i.v./i.m./s.c. delivery of the one or more polyribonucleotides can be achieved.

[1146] Specifically, ribonucleic acid sequences encoding the heavy and light chain variable domains of 1-18 can be recombinantly combined with other immunoglobulin domains to form polyribonucleotides that encoded 1-18 antibody agent immunoglobulin chains. The resulting polyribonucleotides were cloned into the JR81 DNA plasmid. The polyribonucleotides encoded 1-18 antibody agents having different formats, including a conventional IgG1, an scFv-Fc, a CrossMab^{CH1-CLx}, a CrossMab^{CH1-CLcv}, and knob-in-hole formats (see e.g., FIGS. 4-5). Exemplary 1-18 antibody agent configurations and component immunoglobulin chains are shown in Table 2.

[1147] Methods of the present example include:
[1148] (1) Cloning of DNA fragments into a DNA plasmid appropriate to use for RNA expression (e.g., JR81). An appropriate DNA plasmid may encode RNA features including, for example, a 5′ untranslated region (e.g., one that is derived from human a-globin mRNA (hAg)), a Kozak sequence, a signal peptide sequence (e.g., husec2)), and/or a 3′ untranslated region (e.g., one that is a combination of two sequence elements (FI element) and/or a polyA tail 30Linker70 (A30L70)). Examples of appropriate DNA plasmids can be found in WO2021214204A1, which is hereby incorporated by reference in its entirety.
[1149] (2) Verification of selected clones by control digestion and sequencing.

### Codon Optimization

[1150] For optimal expression of the antibody in human cells, the genes for the IgG light chain and heavy chain were generated based on the amino acid sequence of 1-18. Schommers, P., et al., “Restriction of HIV-1 Escape by a Highly Broad and Potent Neutralizing Antibody,” Cell, 2020 Feb. 6; 180 (3): 471-489.e22 (Jan. 30, 2020), which is incorporated herein by reference in its entirety. The amino acid sequence was translated to DNA nucleotide sequence. Restriction sites for Eam1104I (GAAGAG), BamHI (GGATCC), Pstl (CTGCAG), Sbfl (CCTGCAGG), XhoI (CTCGAG), SpeI (ACTAGT), BspEI (TCCGGA), SacI (GAGCTC), Ear1 (CTCTTCN\hat{ }NNN) and NheI (GCTAGC) were eliminated after optimization, because these enzymes were intended to be used either for linearization (Eam1104I) or for cloning (other listed enzymes) of the plasmid. Sequences were also examined for the presence of regions showing high homology to the T7 RNA polymerase termination signal sequence “ATCTGTT” followed by multiple “T” residues.

[1151] Optimization was carried out with the GeneOptimizer® software provided by Life Technologies GmbH GeneArt®. This software adjusts the codon usage by using the most frequent codons and adapts the GC-content of an uploaded sequence for a chosen expression system, in this case Homo sapiens. At the same time, GeneOptimizer® removes sequence repeats, introns, cryptic splice sites, internal ribosome entry sites and RNA destabilizing sequence elements (e.g. UpA-dinucleotides), adds RNA stabilizing sequence elements (e.g. CpG-dinucleotides) and avoids stable RNA secondary structures as well as unwanted sequences such as restriction sites. The output sequence was not further manipulated and used as it was for analysis and ordering of DNA fragment strings. Those of skill in the art would be aware that alternative methods for codon optimization are available. Moreover, additional information on codon optimization approaches is provided herein.

### Cloning Strategy

[1152] Each light chain and heavy chain sequence was cloned into JR81 (pST1-4-AGA-ATAA-hAg-Kozak-GOI-Bam-F—I—No_Lig3-A30LA70) for putative clinical application via Spel and BamHI restriction sites. For this purpose, the parental JR81 plasmid was digested with the restriction enzymes Spel and BamHI. The resulting product was analyzed via agarose gel, purified and its concentration measured by UV spectroscopy. The antibody encoding light chain and heavy chain sequences containing complimentary 5′ and 3′ overhangs matching the Spel and BamHI adjacent plasmid regions, were cloned into the JR81 plasmid by in vivo assembly. Garcia-Nafria, “IVA cloning: A single-tube universal cloning system exploiting bacterial In Vivo Assembly,” Scientific Reports volume 6, Article number: 27459 (2016), which is incorporated herein by reference in its entirety.

[1153] In short, digested JR81 plasmid and antibody encoding sequences were mixed and competent Escherichia coli cells were transformed via heat shock. Clones were sequence verified by Sanger sequencing. Sequencing results were aligned to the reference sequence. The nucleotide sequence of the resulting heavy chain- and light chain-encoding plasmid constructs as well as the sequence of the backbone can be found in SEQ ID NOS: 454-457 (heavy chain) and SEQ ID NO: 458 (light chain). Such sequences encode heavy chain amino acid sequences shown in SEQ ID NOs: 614, 620, 623, and 626, and encode a light chain amino acid sequence shown in SEQ ID NO: 617.

[1154] Exemplary sequences used in the cloning methods above are shown in Table 10 below.

TABLE 10
Exemplary sequences used in 1-18 antibody agent encoding polyribonucleotides.

| Feature | Fragment | Nucleotide Sequence |
|---|---|---|
| General | CH1-Hinge-CH2-CH3 | GCCTCTACAAAGGGCCCTAGCGTGTTCCCTCTGGCTCCTAGCAGCAAGT |
| | (G1m3) | CGACATCTGGCGGAACAGCCGCTCTGGGCTGTCTGGTCAAGGACTACT |
| | | TTCCCGAGCCTGTGACAGTGTCCTGGAACTCTGGCGCTCTGACAAGCG |
| | | GCGTGCACACATTTCCAGCCGTGCTGCAAAGCAGCGGCCTGTACTCTCT |
| | | GAGCAGCGTGGTCACAGTGCCAAGCTCTAGCCTGGGCACCCAGACCTA |
| | | CATCTGCAATGTGAACCACAAGCCTAGCAACACCAAGGTGGACAAGCG |
| | | CGTGGAACCCAAGAGCTGCGACAAGACCCACACCTGTCCTCCATGTCC |
| | | TGCTCCAGAACTGCTCGGCGGACCTTCCGTGTTCCTGTTTCCTCCAAAG |
| | | CCTAAGGACACCCTGATGATCAGCAGAACCCCTGAAGTGACCTGCGT |
| | | GGTGGTGGATGTGTCTCACGAGGACCCCGAAGTGAAGTTCAATTGGT |
| | | ACGTGGACGGCGTGGAAGTGCACAACGCCAAGACCAAGCCTAGAGA |
| | | GGAACAGTACAACAGCACCTACAGAGTGGTGTCCGTGCTGACAGTGC |
| | | TGCACCAGGATTGGCTGAACGGCAAAGAGTACAAGTGCAAGGTGTC |
| | | CAACAAGGCCCTGCCTGCTCCTATCGAGAAAACCATCAGCAAGGCCA |
| | | AGGGCCAGCCTAGGGAACCCCAGGTTTACACACTGCCTCCAAGCCGCG |
| | | AGGAAATGACCAAGAACCAGGTGTCCCTGACCTGCCTCGTGAAGGGCT |
| | | TCTACCCTTCCGATATCGCCGTGGAATGGGAGAGCAATGGCCAGCCTG |
| | | AGAACAACTACAAGACAACCCCTCCTGTGCTGGACAGCGACGGCTCAT |
| | | TCTTCCTGTACAGCAAGCTGACTGTGGATAAGTCCCGGTGGCAGCAGG |
| | | GCAACGTGTTCAGCTGTTCTGTGATGCACGAAGCCCTGCACAACCACTA |
| | | CACCCAGAAAAGCCTGTCTCTGAGCCCCGGCAAGTGATAA (SEQ ID |
| | | NO: 476) |
| | CH1-Hinge-CH2-CH3 | GCCTCCACAAAGGGCCCTAGCGTGTTCCCTCTGGCTCCTAGCAGCAAG |
| | (LS) (G1m3) | TCTACAAGCGGAGGAACAGCTGCCCTGGGCTGCCTGGTCAAGGATTAC |
| | | TTTCCTGAGCCTGTGACCGTGTCTTGGAACTCTGGCGCTCTGACAAGCG |
| | | GCGTGCACACATTTCCAGCCGTGCTGCAAAGCAGCGGCCTGTACTCTCT |
| | | GAGCAGCGTGGTCACAGTGCCAAGCTCTAGCCTGGGCACCCAGACCTA |
| | | CATCTGCAATGTGAACCACAAGCCTAGCAACACCAAGGTGGACAAGAG |
| | | AGTGGAACCCAAGAGCTGCGACAAGACCCACACCTGTCCTCCATGTCC |
| | | TGCTCCAGAACTGCTCGGCGGACCTTCCGTGTTCCTGTTTCCTCCAAAG |
| | | CCTAAGGACACCCTGATGATCAGCAGAACCCCTGAAGTGACCTGCGT |
| | | GGTGGTGGATGTGTCTCACGAGGACCCAGAAGTGAAGTTCAATTGGT |
| | | ACGTGGACGGCGTGGAAGTGCACAACGCCAAGACCAAGCCTAGAGA |
| | | GGAACAGTACAACAGCACCTACAGAGTGGTGTCCGTGCTGACAGTGC |
| | | TGCACCAGGATTGGCTGAACGGCAAAGAGTACAAGTGCAAGGTGTC |
| | | CAACAAGGCCCTGCCTGCTCCTATCGAGAAAACCATCAGCAAGGCCA |
| | | AGGGCCAGCCTAGGGAACCCCAGGTTTACACACTGCCTCCAAGCCGCG |
| | | AGGAAATGACCAAGAACCAGGTGTCCCTGACCTGCCTCGTGAAGGGCT |
| | | TCTACCCTTCCGATATCGCCGTGGAATGGGAGAGCAATGGCCAGCCTG |
| | | AGAACAACTACAAGACAACCCCTCCTGTGCTGGACAGCGACGGCTCAT |
| | | TCTTCCTGTACAGCAAGCTGACCGTGGACAAGTCCAGATGGCAGCAGG |
| | | GCAACGTGTTCAGCTGTAGCGTGCTGCACGAAGCCCTGCACAGCCACT |
| | | ACACCCAGAAAAGCCTGTCTCTGAGCCCCGGCAAATGATAA (SEQ ID |
| | | NO: 477) |
| | CH1-Hinge-CH2-CH3 | GCCTCTACAAAGGGCCCCAGCGTGTTCCCACTGGCTCCTAGCAGCAAG |
| | (cak-LS) (G1m3) | TCTACAAGCGGAGGAACAGCTGCCCTGGGCTGCCTGGTCAAGGATTAC |
| | | TTTCCTGAGCCTGTGACCGTGTCTTGGAACTCTGGCGCTCTGACAAGCG |
| | | GCGTGCACACATTTCCAGCCGTGCTGCAAAGCAGCGGCCTGTACTCTCT |
| | | GAGCAGCGTGGTCACAGTGCCAAGCTCTAGCCTGGGCACCCAGACCTA |
| | | CATCTGCAATGTGAACCACAAGCCTAGCAACACCAAGGTGGACAAGAG |
| | | AGTGGAACCCAAGAGCTGCGACAAGACCCACACCTGTCCTCCATGTCC |
| | | TGCTCCAGAACTGCTCGGCGGACCTTCCGTGTTCCTGTTTCCTCCAAAG |
| | | CCTAAGGACACCCTGATGATCAGCAGAACCCCTGAAGTGACCTGCGT |
| | | GGTGGTGGATGTGTCTCACGAGGACCCAGAAGTGAAGTTCAATTGGT |
| | | ACGTGGACGGCGTGGAAGTGCACAACGCCAAGACCAAGCCTAGAGA |
| | | GGAACAGTACAACAGCACCTACAGAGTGGTGTCCGTGCTGACAGTGC |
| | | TGCACCAGGATTGGCTGAACGGCAAAGAGTACAAGTGCAAGGTGTC |
| | | CAACAAGGCCCTGCCTGCTCCTATCGAGAAAACCATCAGCAAGGCCA |
| | | AGGGCCAGCCTAGGGAACCCCAGGTTTACACCCTGCCTCCATGCCGCG |
| | | AGGAAATGACCAAGAACCAGGTGTCCCTGTGGTGCCTCGTGAAGGGCT |
| | | TCTACCCTTCCGATATCGCCGTGGAATGGGAGAGCAATGGCCAGCCTG |
| | | AGAACAACTACAAGACAACCCCTCCTGTGCTGGACAGCGACGGCTCAT |
| | | TCTTCCTGTACAGCAAGCTGACCGTGGACAAGTCCAGATGGCAGCAGG |
| | | GCAACGTGTTCAGCTGTAGCGTGCTGCACGAAGCCCTGCACAGCCACT |
| | | ACACCCAGAAAAGCCTGTCTCTGAGCCCCGGCAAGTGATAA (SEQ ID |
| | | NO: 478) |
| | CH1- Hinge-CH2 | GCCTCCACAAAGGGCCCTAGCGTGTTCCCACTGGCTCCTAGCAGCAAG |
| | (GAALIE)-CH3 (LS) | TCTACAAGCGGAGGAACAGCCGCTCTGGGCTGCCTGGTCAAGGATTAC |
| | (G1m3) | TTTCCCGAGCCTGTGACCGTGTCCTGGAATTCTGGCGCTCTGACAAGCG |
| | | GCGTGCACACCTTTCCAGCTGTGCTGCAAAGCAGCGGCCTGTACTCTCT |
| | | GAGCAGCGTGGTCACAGTGCCAAGCTCTAGCCTGGGCACCCAGACCTA |
| | | CATCTGCAATGTGAACCACAAGCCTAGCAACACCAAGGTGGACAAGAG |
| | | AGTGGAACCCAAGAGCTGCGACAAGACCCACACCTGTCCTCCATGTCC |
| | | TGCTCCAGAACTGCTGGCCGGACCTTCCGTGTTCCTGTTTCCTCCAAAG |
| | | CCTAAGGACACCCTGATGATCAGCAGAACCCCTGAAGTGACCTGCGT |
| | | GGTGGTGGATGTGTCTCACGAGGACCCTGAAGTGAAGTTCAATTGGT |
| | | ACGTGGACGGCGTGGAAGTGCACAACGCCAAGACCAAGCCTAGAGA |
| | | GGAACAGTACAACAGCACCTACAGAGTGGTGTCCGTGCTGACCGTGC |
| | | TGCACCAGGATTGGCTGAACGGCAAAGAGTACAAGTGCAAGGTGTC |
| | | CAACAAGGCCCTGCCTCTGCCTGAGGAAAAGACCATCAGCAAGGCCA |
| | | AGGGCCAGCCTAGGGAACCCCAGGTTTACACACTGCCTCCAAGCCGCG |
| | | AGGAAATGACCAAGAACCAGGTGTCCCTGACCTGCCTCGTGAAGGGCT |
| | | TCTACCCTTCCGATATCGCCGTGGAATGGGAGAGCAATGGCCAGCCTG |
| | | AGAACAACTACAAGACAACCCCTCCTGTGCTGGACAGCGACGGCTCAT |
| | | TCTTCCTGTACAGCAAGCTGACCGTGGACAAGTCCAGATGGCAGCAGG |
| | | GCAACGTGTTCAGCTGTAGCGTGCTGCACGAAGCCCTGCACAGCCACT |
| | | ACACCCAGAAAAGCCTGTCTCTGAGCCCCGGCAAATGATAA (SEQ ID |
| | | NO: 479) |
| | κ-CL | CGTACGGTGGCCGCTCCTAGCGTGTTCATCTTTCCACCTAGCGACGAGC |
| | | AGCTGAAGTCTGGCACAGCCTCTGTCGTGTGCCTGCTCAACAACTTCTA |
| | | CCCCAGAGAAGCCAAGGTGCAGTGGAAGGTGGACAACGCCCTGCAGA |
| | | GCGGCAATAGCCAAGAGAGCGTGACCGAGCAGGACAGCAAGGACTCT |
| | | ACCTACAGCCTGAGCAGCACACTGACCCTGAGCAAGGCCGACTACGAG |
| | | AAGCACAAAGTGTACGCCTGCGAAGTGACCCACCAGGGCCTTTCTAGC |
| | | CCTGTGACCAAGAGCTTCAACCGGGGCGAGTGCTGATAA (SEQ ID NO: |
| | | 480) |
| | husec2 | ATGGATTGGATTTGGAGAATCCTGTTCCTCGTGGGCGCCGCTACCGGA |
| | | GCCCACTCC (SEQ ID NO: 3) |
| | 5′UTR (cap proximal | AGAATAAACTAGTATTCTTCTGGTCCCCACAGACTCAGAGAGAACCCGC |
| | sequence + human | CACC (SEQ ID NO: 472) |
| | alpha-Globin + | |
| | Kozak) | |
| | 3′UTR (FI-Element + | CTGGTACTGCATGCACGCAATGCTAGCTGCCCCTTTCCCGTCCTGGGT |
| | polyA30LA70) | ACCCCGAGTCTCCCCCGACCTCGGGTCCCAGGTATGCTCCCACCTCCAC |
| | | CTGCCCCACTCACCACCTCTGCTAGTTCCAGACACCTCCCAAGCACGCA |
| | | GCAATGCAGCTCAAAACGCTTAGCCTAGCCACACCCCCACGGGAAAC |
| | | AGCAGTGATTAACCTTTAGCAATAAACGAAAGTTTAACTAAGCTATA |
| | | CTAACCCCAGGGTTGGTCAATTTCGTGCCAGCCACACCCTCGAGCTAG |
| | | CAAAAAAAAAAAAAAAAAAAAAAAAAAAAAAGCATATGACTAAAAAA |
| | | AAAAAAAAAAAAAAAAAAAAAAAAAAAAAAAAAAAAAAAAAAAAAAA |
| | | AAAAAAAAAAAAAAAAA (SEQ ID NO: 481) |
| | 3′UTR | CTGGTACTGCATGCACGCAATGCTAGCTGCCCCTTTCCCGTCCTGGGTA |
| | | CCCCGAGTCTCCCCCGACCTCGGGTCCCAGGTATGCTCCCACCTCCACC |
| | | TGCCCCACTCACCACCTCTGCTAGTTCCAGACACCTCCCAAGCACGCAG |
| | | CAATGCAGCTCAAAACGCTTAGCCTAGCCACACCCCCACGGGAAACAG |
| | | CAGTGATTAACCTTTAGCAATAAACGAAAGTTTAACTAAGCTATACTAA |
| | | CCCCAGGGTTGGTCAATTTCGTGCCAGCCACACC (SEQ ID NO: 473) |
| | polyA30LA70 | AAAAAAAAAAAAAAAAAAAAAAAAAAAAAAGCATATGACTAAAAAAAA |
| | | AAAAAAAAAAAAAAAAAAAAAAAAAAAAAAAAAAAAAAAAAAAAAAA |
| | | AAAAAAAAAAAAAAA (SEQ ID NO: 474) |
| 1-18 | VH | CAGGGCAGACTGTTTCAGTCTGGCGCCGAAGTGAAAAGACCAGGCGC |
| | | CTCTGTGCGGATCAGCTGCAGAGCTGACGACGACCCCTACACCGACGA |
| | | CGATACCTTCACCAAGTACTGGACCCACTGGATCAGACAGGCCCCTGG |
| | | ACAAAGACCTGAGTGGCTGGGAGTGATCAGCCCTCACTTCGCCAGACC |
| | | TATCTACAGCTACAAGTTCCGGGACAGACTGACCCTGACCAGAGACAG |
| | | CTCTCTGACCGCCGTGTACCTGGAACTGAAGGGCCTGCAGCCTGACGA |
| | | CAGCGGCATCTACTTTTGCGCCAGAGATCCCTTCGGCGACAGAGCCCC |
| | | TCACTACAACTACCACATGGACGTGTGGGGCGGAGGCACAGCCGTGA |
| | | TAGTTAGCAGC (SEQ ID NO: 26) |
| | VH in LS variant | CAGGGCAGACTGTTTCAGTCTGGCGCCGAAGTGAAAAGACCAGGCGC |
| | | CTCTGTGCGGATCAGCTGCAGAGCTGACGACGACCCCTACACCGACGA |
| | | CGATACCTTCACCAAGTACTGGACCCACTGGATCAGACAGGCCCCTGG |
| | | ACAAAGACCTGAGTGGCTGGGAGTGATCAGCCCTCACTTCGCCAGACC |
| | | TATCTACAGCTACAAGTTCCGGGACAGACTGACCCTGACCAGAGACAG |
| | | CTCTCTGACCGCCGTGTACCTGGAACTGAAGGGCCTGCAGCCTGACGA |
| | | CAGCGGCATCTACTTTTGCGCCAGAGATCCCTTCGGCGACAGAGCCCC |
| | | TCACTACAACTACCACATGGACGTGTGGGGCGGAGGCACAGCCGTGA |
| | | TAGTTAGCAGC (SEQ ID NO: 26) |
| | VL | GAAGTTGTGCTGACACAGAGCCCCGCCATCCTGAGTGTTAGCCCTGGC |
| | | GATAGAGTGATCCTGAGCTGCAGAGCCTCTCAGGGCCTCGATTCTTCTC |
| | | ACCTGGCCTGGTACAGATTCAAGCGGGGACAGATCCCCACACTGGTCA |
| | | TCTTCGGCACCAGCAACAGAGCCAGAGGCACCCCTGATAGATTTTCCG |
| | | GCTCTGGCAGCGGAGCCGACTTCACCCTGACAATCAGCAGAGTGGAAC |
| | | CCGAGGACTTCGCCACCTACTACTGCCAGAGATACGGCGGCACCCCTA |
| | | TCACATTTGGCGGCGGAACCACACTGGACAAGAAA (SEQ ID NO: 31) |

### Plasmid DNA Preparation

[1155] Plasmid DNA was prepared by selecting E. coli clones for inoculation in Luria-Bertani (LB) medium containing kanamycin. The cultures were grown overnight at 37° C. and ˜150 to 200 rpm. Following cell harvest, purification was done using the QIAGEN Plasmid Plus Maxi Kit according to the manufacturer's instructions. Finally, the concentration was determined by UV spectroscopy. DNA was stored in certified RNase- and DNase-free reaction tubes.

[1156] An overview of the individual plasmids are shown in Table 11 below.

TABLE 11
Exemplary plasmids encoding 1-18 Immunoglobulin Chains

| Molecule | Target Site | Format | Plasmid Insert |
|---|---|---|---|
| 1-18 | CD4bs | IgG1 | 1-18-HC |
| | | | 1-18-LC |
| | | | 1-18-HC(LS) |

### Linearization and DNA Purification

[1157] Linearization of plasmid DNA was performed using appropriate restriction enzymes, followed by purification of the linearized DNA template using magnetic beads (Dynabeads™ MyOne™ Carboxylic Acid) according to the manufacturer's protocol. The DNA concentration was measured by UV spectroscopy.

### In Vitro Transcription

[1158] CleanCap 413 ((m7(3′OMeG)(5′)ppp(5′)(2′OMeA)pG) capped RNA was produced following the process as disclosed, e.g., in Kreiter, S. et al. Cancer Immunol. Immunother. 56, 1577-87 (2007) and WO 2021214204A1, each of which is incorporated herein by reference in its entirety. Methyl pseudo-uridine was used in the in vitro transcription reaction and incorporated into the produced RNA. Cellulose purification of the resulting RNA was performed to isolate single-stranded RNA, followed by concentration measurement by UV spectroscopy. The RNA integrity was determined by microfluidic-based electrophoresis.

### Example 3: Generation of Polyribonucleotides Encoding scFv-Fc 1-18

[1159] In this Example, polyribonucleotides encoding an 1-18 antibody agent was designed in silico as an scFv with different VH-to-VL orientations as well as interconnecting linkers having two different lengths (e.g., (G4S) 4 and (G4S) 5). The nucleotide sequences encoding the scFvs were cloned with a nucleotide sequence encoding an Fc domain to produce Fc-fusion constructs, which encode an antibody agent referred to as an “scFv-Fc” (illustrated in, e.g., FIG. 4D). The Fc-fusion constructs were cloned into the JR81 vector. Cloning of additional scFv-Fc variants with and without an “LS” mutation was performed. Lead candidates were further optimized by introducing one of two different sequences encoding linkers (e.g., a (G4S) 4 or (G4S) 5 linker) between the scFv and Fc domain.

[1160] Objectives of the present Example include:
[1161] (1) Cloning scFv-Fc 1-18 L/S-encoding DNA into JR81 plasmid; and
[1162] (2) Verification of selected clones by control digestion and sequencing.

### Codon Optimization and Cloning Strategy

[1163] Codon optimization and cloning were performed as described above in Example 2. The nucleotide sequence of the resulting scFv-Fc chain-encoding plasmid constructs as well as the sequence of the backbone can be found in SEQ ID NOs: 468-471. Such sequences encode scFv-Fc chain amino acid sequences shown in SEQ ID NOs: 656, 659, 662, and 665.

[1164] Exemplary sequences used in the cloning methods above are shown in Table 12 below.

TABLE 12
Exemplary sequences used in scFv-Fc 1-18 encoding polyribonucleotides.

| Feature | Fragment | Nucleotide Sequence |
|---|---|---|
| General | Hinge (C/S)-CH2-CH3 (LS) | GAACCTAAGAGCAGCGACAAGACCCACACCTGTCCTCCATGTCCTGCTCCAG |
| | (G1m3) | AACTGCTCGGCGGACCTTCCGTGTTCCTGTTTCCTCCAAAGCCTAAGGACA |
| | | CCCTGATGATCAGCAGAACCCCTGAAGTGACCTGCGTGGTGGTGGACGTG |
| | | TCCCACGAAGATCCCGAAGTGAAGTTCAATTGGTACGTGGACGGCGTGGA |
| | | AGTGCACAACGCCAAGACCAAGCCTAGAGAGGAACAGTACAACAGCACC |
| | | TACAGAGTGGTGTCCGTGCTGACCGTGCTGCACCAGGATTGGCTGAACGG |
| | | CAAAGAGTACAAGTGCAAGGTGTCCAACAAGGCCCTGCCTGCTCCTATCGA |
| | | GAAAACCATCAGCAAGGCCAAGGGCCAGCCTAGGGAACCCCAGGTTTACA |
| | | CACTGCCTCCAAGCCGGGAGGAGATGACCAAGAACCAGGTGTCCCTGACCT |
| | | GCCTGGTCAAGGGCTTCTACCCTTCCGATATCGCCGTGGAATGGGAGAGCAA |
| | | TGGCCAGCCTGAGAACAACTACAAGACAACCCCTCCTGTGCTGGACAGCGAC |
| | | GGCTCATTCTTCCTGTACAGCAAGCTGACAGTGGACAAGAGCAGATGGCAGC |
| | | AGGGCAACGTGTTCAGCTGCTCTGTGCTGCACGAAGCCCTGCACAGCCACTA |
| | | CACCCAGAAGTCCCTGTCTCTGAGCCCCGGCAAGTGATAA |
| | | (SEQ ID NO: 482) |
| | husec2 | ATGGATTGGATCTGGCGCATCCTGTTTCTCGTGGGAGCTGCCACAGGCGCC |
| | | CATTCT (SEQ ID NO: 483) |
| | 5′UTR (human alpha- | ATTCTTCTGGTCCCCACAGACTCAGAGAGAACCCGCCACC (SEQ ID NO: |
| | Globin + Kozak) | 484) |
| | 3′UTR (FI-Element + | CTGGTACTGCATGCACGCAATGCTAGCTGCCCCTTTCCCGTCCTGGGTACCC |
| | polyA30LA70) | CGAGTCTCCCCCGACCTCGGGTCCCAGGTATGCTCCCACCTCCACCTGCCCC |
| | | ACTCACCACCTCTGCTAGTTCCAGACACCTCCCAAGCACGCAGCAATGCAG |
| | | CTCAAAACGCTTAGCCTAGCCACACCCCCACGGGAAACAGCAGTGATTAAC |
| | | CTTTAGCAATAAACGAAAGTTTAACTAAGCTATACTAACCCCAGGGTTGGT |
| | | CAATTTCGTGCCAGCCACACCCTCGAGCTAGCAAAAAAAAAAAAAAAAAA |
| | | AAAAAAAAAAAAGCATATGACTAAAAAAAAAAAAAAAAAAAAAAAAAAA |
| | | AAAAAAAAAAAAAAAAAAAAAAAAAAAAAAAAAAAAAAAAAAA (SEQ ID |
| | | NO: 485) |
| | Linker LL4 (VL-VH variant) | GGCGGAGGTGGAAGTGGTGGTGGCGGTAGCGGAGGCGGTGGGTCCGGA |
| | v1 | GGTGGTGGATCT (SEQ ID NO: 486) |
| | Linker LL4 (VL-VH variant) | GGCGGCGGAGGAAGCGGAGGCGGAGGTTCTGGTGGCGGAGGCTCAGGC |
| | v2 | GGTGGCGGATCT (SEQ ID NO: 487) |
| | Linker LL4 (VH-VL variant) | GGCGGAGGTGGAAGTGGTGGTGGCGGTAGCGGAGGCGGTGGGTCCGGA |
| | v1 | GGTGGTGGATCT (SEQ ID NO: 488) |
| | Linker LL4 (VH-VL variant) | GGTGGCGGAGGAAGCGGAGGCGGAGGTTCAGGCGGCGGAGGCTCTGGC |
| | v2 | GGTGGTGGATCT (SEQ ID NO: 489) |
| | Linker LL4 (VH-VL variant) | GGTGGTGGTGGTTCTGGCGGAGGCGGAAGTGGTGGCGGTGGGTCCGGA |
| | v3 | GGTGGTGGATCT (SEQ ID NO: 490) |
| | Linker LL5 (VL-VH variant) | GGCGGCGGAGGAAGCGGAGGCGGAGGTTCTGGTGGTGGTGGCTCTGGT |
| | | GGCGGAGGCTCAGGCGGTGGCGGATCT (SEQ ID NO: 491) |
| | Linker LL5 (VH-VL variant) | GGCGGCGGAGGAAGCGGAGGCGGGGGTTCTGGCGGTGGTGGCTCTGGT |
| | | GGCGGAGGCTCAGGCGGTGGCGGATCT (SEQ ID NO: 492) |
| 1-18 | VH (VL-VH variant) | CAAGGCAGACTGTTTCAGTCTGGCGCCGAAGTGAAAAGACCAGGCGCCTC |
| | | TGTGCGGATCAGCTGTAGAGCCGACGACGACCCCTACACCGACGATGACA |
| | | CCTTCACCAAGTACTGGACCCACTGGATCAGACAGGCCCCTGGACAAAGAC |
| | | CTGAGTGGCTGGGAGTGATCAGCCCTCACTTCGCCAGACCTATCTACAGCT |
| | | ACAAGTTCCGGGACAGACTGACCCTGACCAGAGACAGCTCTCTGACCGCC |
| | | GTGTACCTGGAACTGAAGGGCCTGCAGCCTGACGACAGCGGCATCTACTT |
| | | TTGCGCCAGAGATCCCTTCGGCGACAGGGCTCCCCACTACAACTACCACAT |
| | | GGATGTGTGGGGAGGCGGCACAGCCGTGATTGTGTCTTCC (SEQ ID NO: |
| | | 493) |
| | VH (VH-VL variant) | CAAGGCAGACTGTTTCAGTCTGGCGCCGAAGTGAAAAGACCAGGCGCCTC |
| | | TGTGCGGATCAGCTGCAGAGCTGACGACGACCCCTACACCGACGACGATA |
| | | CCTTCACCAAGTACTGGACCCACTGGATCAGACAGGCCCCTGGACAAAGAC |
| | | CTGAGTGGCTGGGAGTGATCAGCCCTCACTTCGCCAGACCTATCTACAGCT |
| | | ACAAGTTCCGGGACAGACTGACCCTGACCAGAGACAGCTCTCTGACCGCC |
| | | GTGTACCTGGAACTGAAGGGCCTGCAGCCTGACGACAGCGGCATCTACTT |
| | | TTGCGCCAGAGATCCCTTCGGCGACAGAGCCCCTCACTACAACTACCACAT |
| | | GGACGTGTGGGGGGAGGCACAGCCGTGATAGTGTCTTCC (SEQ ID NO: |
| | | 494) |
| | VL (VL-VH variant) | GAAGTGGTGCTGACACAGAGCCCCGCCATCCTGAGTGTTAGCCCTGGCGA |
| | | TAGAGTGATCCTGAGCTGCAGAGCCTCTCAGGGCCTCGATTCTTCTCACCT |
| | | GGCCTGGTACAGATTCAAGCGGGGACAGATCCCCACACTGGTCATCTTCG |
| | | GCACCAGCAACAGAGCCAGAGGCACCCCTGATAGATTTTCCGGCTCTGGC |
| | | AGCGGAGCCGACTTCACCCTGACAATCAGCAGAGTGGAACCCGAGGACTT |
| | | CGCCACCTACTACTGCCAGAGATACGGCGGCACCCCTATCACATTTGGCGG |
| | | CGGAACCACACTGGACAAGAAA (SEQ ID NO: 495) |
| | VL (VH-VL variant) | GAAGTTGTGCTGACACAGAGCCCTGCCATCCTGAGTGTGTCCCCAGGCGAT |
| | | AGAGTGATCCTGTCCTGCAGAGCCTCTCAGGGCCTCGATTCTTCTCACCTG |
| | | GCCTGGTACAGATTCAAGCGGGGACAGATCCCCACACTGGTCATCTTCGGC |
| | | ACCAGCAACAGAGCCAGAGGCACCCCTGATAGATTTTCCGGCTCTGGCAG |
| | | CGGAGCCGACTTCACCCTGACAATCAGCAGAGTGGAACCCGAGGACTTCG |
| | | CCACCTACTACTGCCAGAGATACGGCGGCACCCCTATCACATTTGGCGGCG |
| | | GAACCACACTGGACAAGAAA (SEQ ID NO: 496) |

### Plasmid DNA Preparation

[1165] Plasmid DNA was prepared by selecting E. coli clones for inoculation in Luria-Bertani (LB) medium containing kanamycin. The cultures were grown overnight at 37° C. and ˜150 to 200 rpm. Following cell harvest, purification was done using the QIAGEN Plasmid Plus Maxi Kit according to the manufacturer's instructions. Finally, the concentration was determined by UV spectroscopy. DNA was stored in certified RNase- and DNase-free reaction tubes.

[1166] An overview of the individual plasmids are shown in Table 13 below.

TABLE 13
Exemplary plasmids encoding scFv-Fc 1-18 chains

| Molecule | Target site | Format | Plasmid Insert |
|---|---|---|---|
| 1-18 | CD4bs | scFv-Fc | scFv-1-18(VH-LL4-VL)-Fc(LS) |
| | | | scFv-1-18(VH-LL5-VL)-Fc(LS) |
| | | | scFv-1-18(VL-LL4-VH)-Fc(LS) |
| | | | scFv-1-18(VL-LL5-VH)-Fc(LS) |

### Linearization and DNA Purification

[1167] Linearization of plasmid DNA was performed using appropriate restriction enzymes, followed by purification of the linearized DNA template using magnetic beads (Dynabeads™ MyOne™ Carboxylic Acid) according to the manufacturer's protocol. The DNA concentration was measured by UV spectroscopy.

### In Vitro Transcription

[1168] CleanCap 413 (m7(3′OMeG)(5′)ppp(5′)(2′OMeA)pG) capped RNA was produced following the process as disclosed, e.g., in WO 2021214204A1, which is incorporated herein by reference in its entirety. Methyl pseudo-uridine was used in the in vitro transcription reaction and incorporated into the produced RNA. Cellulose purification of the resulting RNA was performed to isolate single-stranded RNA, followed by concentration measurement by UV spectroscopy. The RNA integrity was determined by microfluidic-based electrophoresis.

### Example 4: Generation of Polyribonucleotides Encoding 1-18 Monospecific CrossMab^{CH1-CLx} and 1-18 Monospecific CrossMab^{CH1-CLcv}

[1169] In this Example, polyribonucleotides encoding an 1-18 in CrossMab^{CH1-CLx} format (as illustrated e.g., in FIG. 4B) were generated. In CrossMab^{CH1-CLx} format, a CH1 domain is fused to a VL and a CL domain is fused in between a VH and a CH2-CH3 set of domains. By introducing these domain swaps, the resulting CrossMab^{CH1-CLx} chains will specifically pair, while strongly inhibiting binding to wild-type or unmodified immunoglobulin chains. Thus, with this format, non-functional mispairings are strongly reduced.

[1170] Polyribonucleotides encoding an 1-18 in CrossMab^{CH1-CLcv} format (as illustrated e.g., in FIG. 4C) were generated. In CrossMab^{CH1-CLcv} format, a VL is operably linked to a CL domain and a VH is operably linked to a CH1-CH2-CH3 set of domains. To minimize incorrect chain pairing, the CL domain of the immunoglobulin light chain and the CH1 domain of the immunoglobulin heavy chain are modified to include charge variants, which promote pairing of a constant domain with a positive charge to a constant domain with a negative charge.

[1171] Polyribonucleotides encoding the CrossMab^{CH1-CLx} and CrossMab^{CH1-CLcv} formats were cloned into the JR81 vector.

[1172] Objectives of the present Example include:
[1173] (1) Clone 1-18 CrossMab^{CH1-CLx}-encoding DNA Fragment Strings into JR81 backbone; and
[1174] (2) Clone 1-18 CrossMab^{CH1-CLcv}-encoding DNA Fragment Strings into JR81 backbone.

[1175] The methods of the present example include: (1) cloning of DNA fragments into appropriate RNA-expression vector; and (2) verification of selected clones by control digestion and sequencing.

### Codon Optimization and Cloning Strategy

[1176] Codon optimization and cloning were performed as described above in Example 2.

[1177] Exemplary sequences used in the cloning methods for 1-18 CrossMab^{CH1-CLx}-encoding DNA Fragment Strings are shown in Table 14 below. The nucleotide sequence of the resulting heavy chain- and light chain-encoding plasmid constructs as well as the sequence of the backbone can be found in SEQ ID NO: 459 (heavy chain) and SEQ ID NO: 460 (light chain). Such sequences encode heavy chain amino acid sequences shown in SEQ ID NOs: 629 and encode light chain amino acid sequence shown in SEQ ID NO: 632.

TABLE 14
Exemplary sequences used in 1-18 CrossMabCH1-CLx encoding
polyribonucleotides.

| Feature | Fragment | Nucleotide Sequence |
|---|---|---|
| General | Hinge | GATAAGACCCACACCTGTCCTCCATGTCCAGCTCCAGAACTGCTCG |
| | (ΔEPKSC)-CH2-CH3 | GCGGACCTTCCGTGTTCCTGTTTCCTCCAAAGCCTAAGGACACCC |
| | (LS) (G1m3) | TGATGATCAGCAGAACCCCTGAAGTGACCTGCGTGGTGGTGGAT |
| | | GTGTCTCACGAGGACCCAGAAGTGAAGTTCAATTGGTACGTGGA |
| | | CGGCGTGGAAGTGCACAATGCCAAGACCAAGCCTAGAGAGGAA |
| | | CAGTACAACAGCACCTACAGAGTGGTGTCCGTGCTGACCGTGCT |
| | | GCACCAGGATTGGCTGAACGGCAAAGAGTACAAGTGCAAGGTG |
| | | TCCAACAAGGCCCTGCCTGCTCCTATCGAGAAAACCATCAGCAAG |
| | | GCCAAGGGCCAGCCTAGGGAACCCCAGGTTTACACACTGCCTCCA |
| | | AGCCGCGAGGAAATGACCAAGAACCAGGTGTCCCTGACCTGCCTG |
| | | GTCAAGGGCTTCTACCCTTCCGATATCGCCGTGGAATGGGAGAGC |
| | | AATGGCCAGCCTGAGAACAACTACAAGACCACACCTCCTGTGCTG |
| | | GACAGCGACGGCTCATTCTTCCTGTACAGCAAGCTGACAGTGGAC |
| | | AAGAGCAGATGGCAGCAGGGCAACGTGTTCAGCTGCTCTGTGCTG |
| | | CACGAAGCCCTGCACAGCCACTACACCCAGAAAAGCCTGAGCCTG |
| | | TCTCCTGGCAAGTGATAA (SEQ ID NO: 497) |
| | κ-CL (AS-QE) | GCATCTGTGGCCGCTCCTAGCGTGTTCATCTTCCCACCTAGCGACG |
| | | AGGAACTGAAGTCTGGCACAGCCAGCGTCGTGTGCCTGCTGAAC |
| | | AACTTCTACCCCAGAGAAGCCAAGGTGCAGTGGAAGGTGGACAA |
| | | CGCCCTGCAGAGCGGCAATAGCCAAGAGAGCGTGACCGAGCAG |
| | | GACAGCAAGGACTCTACCTACAGCCTGAGCAGCACCCTGACACTG |
| | | AGCAAGGCCGACTACGAGAAGCACAAAGTGTACGCCTGCGAAGT |
| | | GACCCACCAGGGCCTTTCTAGCCCTGTGACCAAGAGCTTCAACCG |
| | | GGGCGAGTGC (SEQ ID NO: 498) |
| | CH1(SS) (G1m3) | AGCAGCGCCTCTACAAAGGGCCCCAGCGTTTTCCCACTGGCTCCT |
| | | AGCAGCAAGAGCACATCTGGCGGAACAGCCGCTCTGGGCTGTCT |
| | | GGTCAAGGACTACTTTCCCGAGCCTGTGACCGTGTCCTGGAATTCT |
| | | GGCGCTCTGACATCCGGCGTGCACACCTTTCCAGCTGTGCTGCAA |
| | | AGCAGCGGCCTGTACTCTCTGAGCAGCGTGGTCACAGTGCCAAGC |
| | | TCTAGCCTGGGCACCCAGACCTACATCTGCAATGTGAACCACAAG |
| | | CCTAGCAACACGAAGGTCGACAAGAGAGTGGAACCCAAGTCCTG |
| | | CTGATAA (SEQ ID NO: 499) |
| | husec2 v1 | ATGGATTGGATCTGGCGCATCCTGTTTCTCGTGGGAGCTGCCACA |
| | | GGCGCCCACAGC (SEQ ID NO: 500) |
| | husec2 v2 | ATGGATTGGATCTGGCGCATCCTGTTTCTCGTGGGAGCTGCCACA |
| | | GGCGCCCACTCT (SEQ ID NO: 501) |
| | 5′UTR (human alpha- | ATTCTTCTGGTCCCCACAGACTCAGAGAGAACCCGCCACC (SEQ |
| | Globin + Kozak) | ID NO: 484) |
| | 3′UTR (FI-Element + | CTGGTACTGCATGCACGCAATGCTAGCTGCCCCTTTCCCGTCCTGG |
| | polyA30LA70) | GTACCCCGAGTCTCCCCCGACCTCGGGTCCCAGGTATGCTCCCACC |
| | | TCCACCTGCCCCACTCACCACCTCTGCTAGTTCCAGACACCTCCCA |
| | | AGCACGCAGCAATGCAGCTCAAAACGCTTAGCCTAGCCACACCCC |
| | | CACGGGAAACAGCAGTGATTAACCTTTAGCAATAAACGAAAGTTT |
| | | AACTAAGCTATACTAACCCCAGGGTTGGTCAATTTCGTGCCAGCCA |
| | | CACCCTCGAGCTAGCAAAAAAAAAAAAAAAAAAAAAAAAAAAAA |
| | | AGCATATGACTAAAAAAAAAAAAAAAAAAAAAAAAAAAAAAAAA |
| | | AAAAAAAAAAAAAAAAAAAAAAAAAAAAAAAAAAAAA (SEQ ID |
| | | NO: 502) |
| 1-18 | VH | CAGGGCAGACTGTTTCAGTCTGGCGCCGAAGTGAAAAGACCAG |
| | | GCGCCTCTGTGCGGATCAGCTGCAGAGCTGACGACGACCCCTAC |
| | | ACCGACGACGATACCTTCACCAAGTACTGGACCCACTGGATCAG |
| | | ACAGGCCCCTGGACAAAGACCTGAGTGGCTGGGAGTGATCAGC |
| | | CCTCACTTCGCCAGACCTATCTACAGCTACAAGTTCCGGGACAGA |
| | | CTGACCCTGACCAGAGACAGCTCTCTGACCGCCGTGTACCTGGA |
| | | ACTGAAGGGCCTGCAGCCTGACGACAGCGGCATCTACTTTTGCG |
| | | CCAGAGATCCCTTCGGCGACAGAGCCCCTCACTACAACTACCACA |
| | | TGGACGTGTGGGGCGGAGGCACAGCCGTGATCGTTTCTAGC |
| | | (SEQ ID NO: 28) |
| | VL | GAAGTTGTGCTGACACAGAGCCCCGCCATCCTGAGTGTTAGCCC |
| | | TGGCGATAGAGTGATCCTGAGCTGCAGAGCCTCTCAGGGCCTCG |
| | | ATTCTTCTCACCTGGCCTGGTACAGATTCAAGCGGGGACAGATCC |
| | | CCACACTGGTCATCTTCGGCACCAGCAACAGAGCCAGAGGCACC |
| | | CCTGATAGATTTTCCGGCTCTGGCAGCGGAGCCGACTTCACCCTG |
| | | ACAATCAGCAGAGTGGAACCCGAGGACTTCGCCACCTACTACTG |
| | | CCAGAGATACGGCGGCACCCCTATCACATTTGGCGGCGGAACCA |
| | | CACTGGACAAGAAA (SEQ ID NO: 31) |

[1178] Exemplary sequences used in the cloning methods for 1-18 CrossMab^{CH1-CLcv}-encoding DNA Fragment Strings are shown in Table 15 below. The nucleotide sequence of the resulting heavy chain- and light chain-encoding plasmid constructs as well as the sequence of the backbone can be found in SEQ ID NO: 461-466 (heavy chain) and SEQ ID NO: 467 (light chain). Such sequences encode heavy chain amino acid sequences shown in SEQ ID NOs: 635, 641, 644, 647, 650, and 653 and encode light chain amino acid sequence shown in SEQ ID NO: 638.

TABLE 15
Exemplary sequences used in 1-18 CrossMabCH1-CLcv encoding
polyribonucleotides.

| Feature | Fragment | Nucleotide Sequence |
|---|---|---|
| General | CH1cv (G1m3) | GCTTCCACAAAGGGCCCTAGCGTGTTCCCTCTGGCTCCTAGCAGC |
| | | AAGTCTACAAGCGGAGGAACAGCTGCCCTGGGCTGCCTGGTGGA |
| | | AGATTACTTTCCTGAGCCTGTGACCGTGTCCTGGAACAGCGGTGC |
| | | TCTGACTTCTGGCGTGCACACCTTTCCAGCCGTGCTGCAAAGCAG |
| | | CGGCCTGTACTCTCTGAGCAGCGTGGTCACAGTGCCAAGCTCTAG |
| | | CCTGGGCACCCAGACCTACATCTGCAATGTGAACCACAAGCCTAG |
| | | CAACACCAAGGTGGACGACAGAGTG (SEQ ID NO: 503) |
| | κ-CLcv | CGTACGGTGGCCGCTCCTAGCGTGTTCATCTTTCCACCTAGCGACA |
| | | AGAGACTGAAGTCTGGCACAGCCTCTGTCGTGTGCCTGCTCAACA |
| | | ACTTCTACCCCAGAGAAGCCAAGGTGCAGTGGAAGGTGGACAAC |
| | | GCCCTGCAGAGCGGCAATAGCCAAGAGAGCGTGACCGAGCAGG |
| | | ACAGCAAGGACTCTACCTACAGCCTGAGCAGCACACTGACCCTGA |
| | | GCAAGGCCGACTACGAGAAGCACAAAGTGTACGCCTGCGAAGTG |
| | | ACCCACCAGGGCCTTTCTAGCCCTGTGACCAAGAGCTTCAACCGG |
| | | GGCGAGTGCTGATAA (SEQ ID NO: 504) |
| | Hinge-CH2-CH3 (LS) | GAACCCAAGAGCTGCGACAAGACCCACACCTGTCCTCCATGTCCT |
| | (G1m3) | GCTCCAGAACTGCTCGGCGGACCTTCCGTGTTCCTGTTTCCTCCA |
| | | AAGCCTAAGGACACCCTGATGATCAGCAGAACCCCTGAAGTGAC |
| | | CTGCGTGGTGGTGGATGTGTCTCACGAGGACCCAGAAGTGAAGT |
| | | TCAATTGGTACGTGGACGGCGTGGAAGTGCACAACGCCAAGACC |
| | | AAGCCTAGAGAGGAACAGTACAACAGCACCTACAGAGTGGTGT |
| | | CCGTGCTGACAGTGCTGCACCAGGATTGGCTGAACGGCAAAGA |
| | | GTACAAGTGCAAGGTGTCCAACAAGGCCCTGCCTGCTCCTATCGA |
| | | GAAAACCATCAGCAAGGCCAAGGGCCAGCCTAGGGAACCCCAG |
| | | GTTTACACACTGCCTCCAAGCCGCGAGGAAATGACCAAGAACCAG |
| | | GTGTCCCTGACCTGCCTGGTCAAGGGCTTCTACCCTTCCGATATCGC |
| | | CGTGGAATGGGAGAGCAATGGCCAGCCTGAGAACAACTACAAGA |
| | | CAACCCCTCCTGTGCTGGACAGCGACGGCTCATTCTTCCTGTACAG |
| | | CAAGCTGACCGTGGACAAGAGCAGATGGCAGCAGGGCAACGTGT |
| | | TCAGCTGTAGCGTGCTGCACGAAGCCCTGCACAGCCACTACACCCA |
| | | GAAAAGCCTGTCTCTGAGCCCCGGCAAGTGATAA (SEQ ID NO: |
| | | 505) |
| | Hinge-CH2-CH3 (cah-LS) | GAACCCAAGAGCTGCGACAAGACCCACACCTGTCCTCCATGTCCT |
| | (G1m3) | GCTCCAGAACTGCTCGGCGGACCTTCCGTGTTCCTGTTTCCTCCA |
| | | AAGCCTAAGGACACCCTGATGATCAGCAGAACCCCTGAAGTGAC |
| | | CTGCGTGGTGGTGGATGTGTCTCACGAGGACCCCGAAGTGAAGT |
| | | TCAATTGGTACGTGGACGGCGTGGAAGTGCACAACGCCAAGACC |
| | | AAGCCTAGAGAGGAACAGTACAACAGCACCTACAGAGTGGTGT |
| | | CCGTGCTGACCGTGCTGCACCAGGATTGGCTGAACGGCAAAGA |
| | | GTACAAGTGCAAGGTGTCCAACAAGGCCCTGCCTGCTCCTATCGA |
| | | GAAAACCATCAGCAAGGCCAAGGGCCAGCCTCGCGAACCTCAAG |
| | | TCTGTACACTGCCTCCTAGCCGCGAGGAAATGACCAAGAACCAGG |
| | | TGTCCCTGAGCTGCGCCGTGAAGGGCTTTTACCCTTCCGATATCGC |
| | | CGTGGAATGGGAGAGCAATGGCCAGCCTGAGAACAACTACAAGA |
| | | CAACCCCTCCTGTGCTGGACAGCGACGGCTCATTCTTCCTGGTGTC |
| | | CAAGCTGACAGTGGACAAGAGCAGATGGCAGCAGGGCAACGTGT |
| | | TCAGCTGCAGCGTGCTGCATGAAGCCCTGCACAGCCACTACACCCA |
| | | GAAGTCCCTGTCTCTGAGCCCCGGCAAGTGATAA (SEQ ID NO: |
| | | 506) |
| | Hinge-CH2-CH3 (cak-LS) | GAACCCAAGAGCTGCGACAAGACCCACACCTGTCCTCCATGTCCT |
| | (G1m3) | GCTCCAGAACTGCTCGGCGGACCTTCCGTGTTCCTGTTTCCTCCA |
| | | AAGCCTAAGGACACCCTGATGATCAGCAGAACCCCTGAAGTGAC |
| | | CTGCGTGGTGGTGGATGTGTCTCACGAGGACCCCGAAGTGAAGT |
| | | TCAATTGGTACGTGGACGGCGTGGAAGTGCACAACGCCAAGACC |
| | | AAGCCTAGAGAGGAACAGTACAACAGCACCTACAGAGTGGTGT |
| | | CCGTGCTGACCGTGCTGCACCAGGATTGGCTGAACGGCAAAGA |
| | | GTACAAGTGCAAGGTGTCCAACAAGGCCCTGCCTGCTCCTATCGA |
| | | GAAAACCATCAGCAAGGCCAAGGGCCAGCCTAGGGAACCCCAG |
| | | GTTTACACCCTGCCTCCATGCCGCGAGGAAATGACCAAGAACCAG |
| | | GTGTCCCTGTGGTGCCTGGTCAAGGGCTTCTACCCTTCCGATATCG |
| | | CCGTGGAATGGGAGAGCAATGGCCAGCCTGAGAACAACTACAAG |
| | | ACAACCCCTCCTGTGCTGGACAGCGACGGCTCATTCTTCCTGTACA |
| | | GCAAGCTGACAGTGGACAAGAGCAGATGGCAGCAGGGCAACGTG |
| | | TTCAGCTGCAGCGTGCTGCATGAAGCCCTGCACAGCCACTACACCC |
| | | AGAAGTCCCTGTCTCTGAGCCCCGGCAAGTGATAA (SEQ ID NO: |
| | | 507) |
| | Hinge-CH2(GAALIE)-CH3 | GAACCCAAGAGCTGCGACAAGACCCACACCTGTCCTCCATGTCCT |
| | (LS) (G1m3) | GCTCCAGAACTGCTGGCCGGACCTTCCGTGTTCCTGTTTCCTCCA |
| | | AAGCCTAAGGACACCCTGATGATCAGCAGAACCCCTGAAGTGAC |
| | | CTGCGTGGTGGTGGATGTGTCTCACGAGGACCCTGAAGTGAAGT |
| | | TCAATTGGTACGTGGACGGCGTGGAAGTGCACAACGCCAAGACC |
| | | AAGCCTAGAGAGGAACAGTACAACAGCACCTACAGAGTGGTGT |
| | | CCGTGCTGACCGTGCTGCACCAGGATTGGCTGAACGGCAAAGA |
| | | GTACAAGTGCAAGGTGTCCAACAAGGCCCTGCCTCTGCCTGAGG |
| | | AAAAGACCATCAGCAAGGCCAAGGGCCAGCCTAGGGAACCCCA |
| | | GGTTTACACACTGCCTCCAAGCCGCGAGGAAATGACCAAGAACCA |
| | | GGTGTCCCTGACCTGCCTGGTCAAGGGCTTCTACCCTTCCGATATC |
| | | GCCGTGGAATGGGAGAGCAATGGCCAGCCTGAGAACAACTACAA |
| | | GACAACCCCTCCTGTGCTGGACAGCGACGGCTCATTCTTCCTGTAC |
| | | AGCAAGCTGACCGTGGACAAGTCCAGATGGCAGCAGGGCAACGT |
| | | GTTCAGCTGTAGCGTGCTGCACGAAGCCCTGCACAGCCACTACACC |
| | | CAGAAAAGCCTGTCTCTGAGCCCCGGCAAATGATAA (SEQ ID NO: |
| | | 508) |
| | Hinge-CH2(GAALIE)-CH3 | GAACCCAAGAGCTGCGACAAGACCCACACCTGTCCTCCATGTCCT |
| | (cah-LS) (G1m3) | GCTCCAGAACTGCTGGCCGGACCTTCCGTGTTCCTGTTTCCTCCA |
| | | AAGCCTAAGGACACCCTGATGATCAGCAGAACCCCTGAAGTGAC |
| | | CTGCGTGGTGGTGGATGTGTCTCACGAGGACCCCGAAGTGAAGT |
| | | TCAATTGGTACGTGGACGGCGTGGAAGTGCACAACGCCAAGACC |
| | | AAGCCTAGAGAGGAACAGTACAACAGCACCTACAGAGTGGTGT |
| | | CCGTGCTGACCGTGCTGCACCAGGATTGGCTGAACGGCAAAGA |
| | | GTACAAGTGCAAGGTGTCCAACAAGGCCCTGCCTCTGCCTGAGG |
| | | AAAAGACCATCAGCAAGGCCAAGGGCCAGCCTAGGGAACCCCA |
| | | AGTCTGTACACTGCCTCCTAGCCGCGAGGAAATGACCAAGAACCA |
| | | GGTGTCCCTGAGCTGCGCCGTGAAGGGCTTTTACCCTTCCGATATC |
| | | GCCGTGGAATGGGAGAGCAATGGCCAGCCTGAGAACAACTACAA |
| | | GACAACCCCTCCTGTGCTGGACAGCGACGGCTCATTCTTCCTGGTG |
| | | TCCAAGCTGACAGTGGACAAGAGCAGATGGCAGCAGGGCAACGT |
| | | GTTCAGCTGCAGCGTGCTGCATGAAGCCCTGCACAGCCACTACACC |
| | | CAGAAGTCCCTGTCTCTGAGCCCCGGCAAGTGATAA (SEQ ID NO: |
| | | 509) |
| | Hinge-CH2(GAALIE)-CH3 | GAACCCAAGAGCTGCGACAAGACCCACACCTGTCCTCCATGTCCT |
| | (cak-LS) (G1m3) | GCTCCAGAACTGCTGGCCGGACCTTCCGTGTTCCTGTTTCCTCCA |
| | | AAGCCTAAGGACACCCTGATGATCAGCAGAACCCCTGAAGTGAC |
| | | CTGCGTGGTGGTGGATGTGTCTCACGAGGACCCCGAAGTGAAGT |
| | | TCAATTGGTACGTGGACGGCGTGGAAGTGCACAACGCCAAGACC |
| | | AAGCCTAGAGAGGAACAGTACAACAGCACCTACAGAGTGGTGT |
| | | CCGTGCTGACCGTGCTGCACCAGGATTGGCTGAACGGCAAAGA |
| | | GTACAAGTGCAAGGTGTCCAACAAGGCCCTGCCTCTGCCTGAGG |
| | | AAAAGACCATCAGCAAGGCCAAGGGCCAGCCTAGGGAACCCCA |
| | | GGTTTACACCCTGCCTCCATGCCGCGAGGAAATGACAAAGAACCA |
| | | GGTGTCCCTGTGGTGCCTGGTCAAGGGCTTCTACCCTTCCGATATC |
| | | GCCGTGGAATGGGAGAGCAATGGCCAGCCTGAGAACAACTACAA |
| | | GACAACCCCTCCTGTGCTGGACAGCGACGGCTCATTCTTCCTGTAC |
| | | AGCAAGCTGACAGTGGACAAGAGCAGATGGCAGCAGGGCAACGT |
| | | GTTCAGCTGCAGCGTGCTGCATGAAGCCCTGCACAGCCACTACACC |
| | | CAGAAGTCCCTGTCTCTGAGCCCCGGCAAGTGATAA (SEQ ID NO: |
| | | 510) |
| | husec2 v1 | ATGGATTGGATCTGGCGCATCCTGTTTCTCGTGGGAGCTGCCACA |
| | | GGCGCCCACTCT (SEQ ID NO: 501) |
| | husec2 v2 | ATGGATTGGATTTGGAGAATCCTGTTCCTCGTGGGCGCCGCTACC |
| | | GGAGCCCACTCC (SEQ ID NO: 3) |
| | 5′UTR (human alpha- | ATTCTTCTGGTCCCCACAGACTCAGAGAGAACCCGCCACC (SEQ |
| | Globin + Kozak) | ID NO: 484) |
| | 3′UTR (FI element + | CTGGTACTGCATGCACGCAATGCTAGCTGCCCCTTTCCCGTCCTGG |
| | polyA30LA70) | GTACCCCGAGTCTCCCCCGACCTCGGGTCCCAGGTATGCTCCCACC |
| | | TCCACCTGCCCCACTCACCACCTCTGCTAGTTCCAGACACCTCCCA |
| | | AGCACGCAGCAATGCAGCTCAAAACGCTTAGCCTAGCCACACCCC |
| | | CACGGGAAACAGCAGTGATTAACCTTTAGCAATAAACGAAAGTTT |
| | | AACTAAGCTATACTAACCCCAGGGTTGGTCAATTTCGTGCCAGCCA |
| | | CACCCTCGAGCTAGCAAAAAAAAAAAAAAAAAAAAAAAAAAAAA |
| | | AGCATATGACTAAAAAAAAAAAAAAAAAAAAAAAAAAAAAAAAA |
| | | AAAAAAAAAAAAAAAAAAAAAAAAAAAAAAAAAAAAA (SEQ ID |
| | | NO: 511) |
| 1-18 | VH | CAGGGCAGACTGTTTCAGTCTGGCGCCGAAGTGAAAAGACCAG |
| | | GCGCCTCTGTGCGGATCAGCTGCAGAGCTGACGACGACCCCTAC |
| | | ACCGACGACGATACCTTCACCAAGTACTGGACCCACTGGATCAG |
| | | ACAGGCCCCTGGACAAAGACCTGAGTGGCTGGGAGTGATCAGC |
| | | CCTCACTTCGCCAGACCTATCTACAGCTACAAGTTCCGGGACAGA |
| | | CTGACCCTGACCAGAGACAGCTCTCTGACCGCCGTGTACCTGGA |
| | | ACTGAAGGGCCTGCAGCCTGACGACAGCGGCATCTACTTTTGCG |
| | | CCAGAGATCCCTTCGGCGACAGAGCCCCTCACTACAACTACCACA |
| | | TGGACGTGTGGGGCGGAGGCACAGCCGTGATCGTTTCTAGC |
| | | (SEQ ID NO: 28) |
| | VL | GAAGTTGTGCTGACACAGAGCCCCGCCATCCTGAGTGTTAGCCC |
| | | TGGCGATAGAGTGATCCTGAGCTGCAGAGCCTCTCAGGGCCTCG |
| | | ATTCTTCTCACCTGGCCTGGTACAGATTCAAGCGGGGACAGATCC |
| | | CCACACTGGTCATCTTCGGCACCAGCAACAGAGCCAGAGGCACC |
| | | CCTGATAGATTTTCCGGCTCTGGCAGCGGAGCCGACTTCACCCTG |
| | | ACAATCAGCAGAGTGGAACCCGAGGACTTCGCCACCTACTACTG |
| | | CCAGAGATACGGCGGCACCCCTATCACATTTGGCGGCGGAACCA |
| | | CACTGGACAAGAAA (SEQ ID NO: 31) |

[1179] An overview of the individual plasmids are shown in Table 16 below.

TABLE 16
Exemplary plasmids encoding CrossMab chains

| Molecule | Target Site | Format | Plasmid Insert |
|---|---|---|---|
| 1-18 | CD4bs | IgG1 | VH(1-18)-CK-Fc(LS) |
| | | CrossMab^{CH1-CLx} | VL(1-18)-CH1 |
| | | IgG1 | VH(1-18)-CH1cv-Fc(LS) |
| | | CrossMab^{CH1-CLcv} | VL(1-18)-CKcv |

### Example 5: In Vitro Validation of 1-18 IgG1 Antibody Agents Delivered to Cells Using RNA Constructs

### Expression and Neutralization Analysis of 1-18 and 1-18 L/S Antibody Agents Delivered to Cells Using RNA Constructs

[1180] In order to determine whether polyribonucleotides encoding 1-18 IgG antibody agents, as described herein, can induce the production of the 1-18 IgG antibody agents, the expression and neutralization capabilities of the 1-18 IgG antibody agents were tested.

[1181] Additionally, it is advantageous that antibody agents delivered by polyribonucleotides may be able to reach a high antibody titer in the serum of subjects, e.g., over a period of time. Thus, a mutation was introduced (“L/S”) in the CH3 domain of certain antibody agents to improve binding to the FcRn receptor and thereby improve the terminal kinetic and increase the half-life of the antibody agent (see, for example, Zalevsky et al., 2010, Nature biotechnology, which is incorporated herein by reference in its entirety). In this Example, 1-18 antibody agents designed with this mutation were evaluated for whether the mutation impacts certain parameters like expression or neutralization abilities. Antibody agents may also be modified with GAALIE mutations (G236A/A330L/1332E) in the Fc region so as to enhance dendritic cell maturation and induce protective CD8+ T cell responses (see, for example, Corti et al., 2021, Cell, which is incorporated herein by reference).

[1182] In this experiment, the expression of 1-18 and 1-18 L/S IgG antibody agents from polyribonucleotides described herein was tested.

[1183] Objectives of this Example include: Evaluating the expression and purity of 1-18 and 1-18 L/S IgG antibody agents by Gyros and Western blot.

[1184] In this Example, HEK293T/17 cells were electroporated with polyribonucleotides encoding an 1-18 IgG antibody agent, an 1-18 L/S IgG antibody agent, and a control antibody agent (referred to as “RiboMab01”) (1.5:1 HC/LC). The respective antibody agent concentrations in the supernatant were determined by GYROS ELISA. Reducing and non-reducing denaturing Western blot analyses were also performed to check the ratio of antibody agents produced versus high molecular weight (HMW) aggregates and free chains.

### Electroporation

[1185] 25 μg RNA (1.5/1 HC/LC, 15 μg HC+10 μg LC) of polyribonucleotides encoding 1-18 HC, 1-18 L/S HC and 1-18 LC in IgG1 format were delivered to HEK293T/17 cells electroporation in triplicate. RiboMab01 was used as a control. First, HEK293T/17 cells were washed 2× with 20 ml cooled medium. Electroporation was performed in triplicate in pre-cooled 0.4 cm cuvettes. Cells in each sample were in a concentration of 2*10⁶ cells/250 μl or 8*10⁶ cells/ml. Electroporation conditions were 250V, 2 pulses for 5 ms. Cells were incubated on ice for 10 minutes after electroporation. 0.75 ml of Expi293 Expression Medium was prepared in a well of a 12-well plate for resuspension of each sample.

[1186] Other cells were then transferred into Expi293 Medium and counted. Cells were seeded at 2*10⁶ cells/ml or 1 ml/well and incubated for 48 hours at 37° C. Supernatants were harvested by centrifugation of the cells at 300 g for 10 minutes, followed by careful aspiration so as to not disturb the cell pellet, and then stored at 4° C.

### Gyros ELISA for RibobNAb Quantitation

[1187] 1-18 antibody agents expressed from polyribonucleotides delivered to a cell (referred to herein as “RibobNAbs”), as described in Examples 2-4, were quantified in serum using Gyros xPand™ XPA1025 ELISA device (Gyros Protein Technologies AB, Uppsala, Sweden). A sandwich immunoassay format was performed using a biotinylated anti-human IgG Fc antibody (Reagent A, ready-to-use solution) for capture and Alexa® Fluor® 647 labeled anti-human IgG (Reagent B, ready-to use solution, both from Generic PK Kit-Low Titer or Generic TK Kit-High Titer, Gyros Protein Technologies AB) for the detection of RibobNAb IgG, IgG L/S formats.

[1188] A sandwich immunoassay format was also performed to determine intact (fully assembled) RibobNAbs IgG, IgG L/S, IgG CrossMab or scFv-Fc content in cell culture supernatant samples from HEK293T17 cells transfected with mRNA. The RibobNAbs were captured by a biotinylated derivative of protein A from Staphylococcus aureus (Reagent A, ready-to-use solution from Gyrolab huIgG Kit, Gyros Protein Technologies AB). An Alexa Fluor 647 labeled F(ab′)2 fragment of anti-human IgG (Reagent B, ready-to-use solution from Gyrolab huIgG Kit, Gyros Protein Technologies AB) was used for detection of RibobNAb IgG, IgG L/S or IgG CrossMab formats and 25 nM of Goat anti-Human IgG (H+L) Cross-Adsorbed Secondary Antibody, Alexa Fluor 647 (Thermo Fisher Scientific, Darmstadt) in Rexxip F (Gyros Protein Technologies AB) for scFv-Fc format, respectively.

[1189] The assay was processed for low titer in a Gyrolab Bioaffy 1000 HC CD (Gyros Protein Technologies AB) with a dynamic range of 1.4 to 333 ng/ml (IgG, IgG L/S formats in serum) and 12.3 to 9,000 ng/ml (IgG, IgG L/S, IgG CrossMab formats in cell culture supernatant), or for high titer in a Gyrolab Bioaffy 20 HC CD (Gyros Protein Technologies AB) with a dynamic range of 111 to 234,000 ng/ml (IgG, IgG L/S in serum) and 111 to 9,000 ng/mL (scFv-Fc Format in cell culture supernatant), respectively.

[1190] All samples, reference proteins and reagents were centrifuged for 4 minutes at 12,000×g to sediment any aggregates. Serum samples containing the respective RibobNAb molecules were diluted 10-fold in Reagent F buffer (Gyrolab PK Low Titer/TK Kit High Titer, Gyros Protein Technologies AB) and RibobNAbs molecules in cell culture supernatant diluted 5 to 10-fold in Reagent E buffer (Gyrolab huIgG Kit, Gyros Protein Technologies AB), respectively. The CD columns were washed with Reagent C and D (Gyrolab PK/TK Kit, Gyrolab huIgG Kit, Gyros Protein Technologies AB).

[1191] The Gyrolab huIgG Standard (Gyros Protein Technologies AB), recombinant PGT121 L/S antibody (Lake Pharma Inc., San Carlos, CA) and the recombinant Anti-APRIL, human IgG1 lambda scFv-Fc (Biomol GmbH, Hamburg) served as reference proteins to calculate IgG, IgG L/S, IgG CrossMab or scFv-Fc RibobNAbs concentration in the assays, respectively.

[1192] For RibobNAb quantitation, all materials prepared for the Gyros ELISA assay were loaded onto a 96-well plate (Gyros Protein Technologies AB) according to the Gyrolab loading list. Data were generated for low RibobNAb titers with the Gyrolab Gyrolab Generic PK kit method v1 (serum) and huIgG Low Titer method (cell culture supernatant) and for high RibobNAb titers with Gyrolab Gyrolab Generic TK kit method v1 (serum) and huIgG High Titer v2 method (cell culture supernatant), respectively. Results were evaluated using the Gyrolab Evaluator software.

[1193] All materials prepared for the Gyros ELISA assay were loaded onto a 96-well plate (Gyros Protein Technologies AB) according to the Gyrolab Loading list.

[1194] Data was generated for low RibobNAb titers with the Gyrolab Generic PK kit method v1 and the results evaluated using Gyrolab Evaluator software.

### Western Blot Analysis of RibobNAbs in Cell Culture Supernatants

[1195] Cell culture supernatant (SN) samples were first mixed with varying volumes of SN from mock-transfected HEK293T/17 cells, a fixed volume of water as well as 4x Laemmli buffer and heated to 95° C. for 5 minutes under non-reducing conditions. Two different samples of the reference protein (5726/5725p) were used for gauging RibobNAb quality in the SN, containing (i) 0.23% or (ii) 96.5% HMW intermediates. As negative control, SN from Mock-transfected HEK-293T-17 cells was used. The samples were separated by SDS-PAGE for 40 minutes followed by transfer of the separated bands onto a blotting membrane (Bio-Rad). For western blotting, the membrane was incubated with two HRP-conjugated detection antibodies: goat anti-human kappa LC at a 1:500 dilution (ID176, Thermo Fisher Scientific) and goat anti-human IgG Fd region pAb (Cell Sciences, Newburyport, MA, USA) at a 1:2,000 dilution in 3% BSA Fraction V (Eurobio Scientific, Les Ulis, France). The membrane was visualized with Clarity Western ECL Reagent (Bio-Rad) on a Vilber Fusion FX imaging device (Vilber, Collégien, France) for 4 seconds and the data analyzed with Image Lab Software (Bio-Rad).

### Results

[1196] The results from the Gyros ELISA in this Example show that 1-18 and 1-18 L/S IgG antibody agents were produced at a higher level than the RiboMab01 control (see FIG. 11).

[1197] The results from the Western blot analysis are shown in FIG. 12. Western Blot semi-quantitative HMW analysis summary is shown in Table 17 below. The non-reducing denaturing Western blot of 1-18 and 1-18 L/S IgG antibody agents did not show aggregates, HMW aggregates, or free (unbound) light chains. The Western blot results of 1-18 IgG antibody agent, 1-18 L/S IgG antibody agent, and the RiboMab01 control displayed a similar expression pattern with a main fraction of the antibodies as fully assembled monomeric (>80%). Reducing conditions revealed HC and LC bands were found at the correct height. Non-reducing conditions revealed 1-18 IgG antibody agent and 1-18 L/S IgG antibody agent monomer bands at the correct height. These results suggest that 1-18 IgG antibody agent and 1-18 L/S IgG antibody agent were correctly assembled.

TABLE 17
Western Blot semi-quantitative HMW analysis summary

| | % | % | % |
|---|---|---|---|
| Sample Name | HMW | Monomer | LMW |
| IgG rec. Protein Control | 3.1 | 83.3 | 13.5 |
| Mock | 0 | 0 | 0 |
| 1-18 RibobNAb Sample A | 0 | 83.6 | 16.5 |
| 1-18 RibobNAb Sample B | 0 | 85.8 | 14.3 |
| 1-18 RibobNAb Sample C | 0 | 83.2 | 16.9 |
| 1-18 L/S RibobNAb Sample A | 0 | 82.5 | 17.5 |
| 1-18 L/S RibobNAb Sample B | 0 | 84.4 | 15.6 |
| 1-18 L/S RibobNAb Sample C | 0 | 82.8 | 17.2 |
| IgG RiboMab Control Sample A | 0 | 86.7 | 13.4 |
| IgG RiboMab Control Sample B | 0 | 86.1 | 13.9 |
| IgG RiboMab Control Sample C | 0 | 83.4 | 16.7 |

### Neutralization Studies

[1198] A TZM-bl pseudovirus neutralizing assay (pVNT assay) was used to determine the neutralization capacity of 1-18 and 1-18 L/S IgG antibody agents (e.g., as described in Sarzotti-Kelsoe et al., 2014. Journal of immunological methods, which is incorporated herein by reference). TZM-bl cells are engineered to express CD4, CCR5, and CXCR4 and to contain integrated reporter genes for firefly Luc and E. coli B-galactosidase under the control of an HIV-1 long terminal repeat.

[1199] Briefly, HEK293T/17 cells were transfected with RNA which encoded for IgG RibobNAb antibody agent. HEK293T/17 cells were then cultured under suitable conditions and for a suitable length of time so as to allow for RibobNAb production and secretion into the cell culture supernatant. HEK293T/17 cell culture supernatant was then harvested and added to TZM-bl cells at the same time that samples containing virus were added to TZM-bl cells. The TZM-bl cells were then incubated for about 48 hours, followed by addition of a Luc reporter gene assay system reagent. Virus infectivity was measured in relative luminescence units (RLU).

[1200] In detail: Pseudovirus generation: HIV-1 Env pseudotyped viruses were prepared by co-transfecting exponentially dividing HEK293T/17 cells (5×10⁶ cells in 15 ml growth medium in a T-75 culture flask) with 4 g of rev/env expression plasmid and 8 g of an env-deficient HIV-1 backbone vector (pSG3Δenv) using FuGENE 6 reagent (Promega, USA) in growth medium, as described by the manufacturer. Virus-containing culture supernatants were recovered from the flasks and filtered through a 0.45 m filter. Env-pseudotyped virus stocks were titrated by performing serial 5-fold dilutions in growth medium in 96-well culture plates (11 dilution steps total). Freshly trypsinized TZM-bl cells (10,000 cells in 100 μl volume) were added to each well in growth medium containing an optimized concentration of DEAE-dextran and incubated for 48 hrs. 100 μl of culture supernatant was removed from each well and replaced with a Luc reporter gene assay system reagent (Brite-Glo, Promega, used as per manufacturer's recommendation). After a 2-min incubation at room temperature to allow cell lysis, 150 μl of cell lysate was transferred to 96-well black solid plates (Corning-Costar) for measurements of luminescence. For each Env pseudotyped virus an optimal dilution to use in the TZM-bl assay (expressed as RLU equivalent) was calculated to ensure a standardized virus dose.

[1201] pVNT assay: HEK293T/17 cells were transfected with RNA which encoded for IgG RibobNAb antibody agent. HEK293T/17 cells were then cultured under suitable conditions and for a suitable length of time so as to allow for RibobNAb production and secretion into the cell culture supernatant. Supernatants from cells transfected with polyribonucleotides or purified IgG samples were tested at indicated primary dilutions/concentrations and serially diluted 3-fold 7-times in duplicate wells. Those skilled in the art will understand that alternative techniques may be used in order to introduce RNA encoding RibobNAbs described herein into host cells. Diluted samples were mixed with an optimal titer of Env-pseudotyped virus and co-incubated at 37° C. for 1 h. TZM-bl cells were then added at a final concentration of 10⁴ cells per well in a 96-well plate in medium supplemented with DEAE-dextran for 48 hrs at 37° C. and 5% CO2. 100 μl of culture supernatant was removed from each well and replaced with a Luc reporter gene assay system reagent (Brite-Glo, Promega, used as per manufacturer's recommendation). After a 2-min incubation at room temperature to allow cell lysis, 150 μl of cell lysate was transferred to 96-well black solid plates (Corning-Costar) for measurements of luminescence. After subtracting background relative luminescence units (RLUs) of non-infected TZM-bl cells, 50% and 80% inhibitory concentrations (IC50s and IC80s) were determined as the antibody/IgG concentrations resulting in a 50%/80% RLU reduction compared to untreated virus control wells. The following HIV-1 Env pseudovirus isolates were selected for testing against cell supernatants or purified IgG: CNE19 (clade B), q23.17 (clade A1), Tro.11 (clade B), RHPA4259.7 (clade B), 6540 V4_C1 (clade CRF01_AC), ZM249M.PL1 (clade C). A Murine Leukemia Virus (MuLV) pseudovirus was used as a negative control.

[1202] Results from the pVNT assays showed that 1-18 IgG antibody agent and 1-18 L/S IgG antibody agents had good breadth and potency (FIG. 20).

### Example 6: In Vitro Validation of scFv-Fc 1-18 L/S Antibody Agents Delivered to Cells Using RNA Constructs

Expression and Neutralization Analysis of scFv-Fc 1-18 L/S Antibody Agents Delivered to Cells Using RNA Constructs

[1203] Generation of polyribonucleotides encoding for 1-18 antibody agents as described herein allows the 1-18 agents to be delivered in combination with other polyribonucleotides that encode additional anti-HIV antibody agents. Use of the technologies and approaches described herein also allows for simultaneous production of different antibody agents from polyribonucleotides. The formats of antibody agents have been designed to minimize or eliminate the risk of immunoglobulin chain mispairing. Being able to combine multiple antibody agent formulations as described herein (e.g., including an 1-18 antibody agent) allows for the development of a composition (e.g., a pharmaceutical composition) that delivers multiple antibody agents together so that they can bind different epitopes of the HIV virus, thereby minimizing viral escape through mutations.

[1204] In order to determine whether polyribonucleotides encoding scFv-Fc 1-18 L/S antibody agents, as described herein, can induce the production of the scFv-Fc 1-18 L/S antibody agents, the expression and neutralization capabilities of the scFv-Fc 1-18 L/S antibody agents were tested. Different domain orientations of VH: VL and linkers lengths were utilized in the scFv-Fc 1-18 L/S antibody agents tested.

[1205] Objectives of this Example include:
[1206] (1) Evaluate the expression and aggregation of scFv-Fc 1-18 L/S antibody agents by Gyros and Western Blot; and
[1207] (2) Test the influence of different domain orientations and linker length on the production and functionality of scFv-Fc 1-18 L/S antibody agents.

[1208] In this Example, HEK293T/17 cells were electroporated with polyribonucleotides encoding various scFv-Fc 1-18 L/S antibody agents and a control RiboMab01 (1.5:1 HC/LC). The scFv-Fc 1-18 L/S antibody agent concentration in the supernatant was determined by GYROS ELISA. A non-reducing denaturing Western blot analysis was also performed to check the ratio of antibody agents produced as compared to HMW aggregates and free chains.

### Methods

[1209] Electroporation, Gyros ELISA for RibobNAb Quantification, and Western Blot Analysis of RibobNAbs in Cell Culture Supernatants were performed as described above in Example 5.

### Results

[1210] The results from the Gyros ELISA in this Example show that all scFv-Fc 1-18 L/S antibody agents were successfully expressed. VL-LL5-VH orientation was optimal for expression of a scFv-Fc 1-18 L/S antibody agent. FIG. 13 shows the results relative to parental IgG and control IgG.

[1211] The results from the Western Blot Analysis are shown in FIGS. 14 & 15. Western Blot semi-quantitative HMW analysis summary is shown in Table 18 below. The results from the Western Blot analysis show that all scFv-Fc 1-18 L/S antibody agents are correctly assembled and show no Aggregates and LMWs.

TABLE 18
Western Blot semi-quantitative HMW analysis summary

| | % | % | % |
|---|---|---|---|
| Sample Name | HMW | Monomer | LMW |
| IgG rec. Protein Control | 0 | 78.5 | 21.5 |
| scFv-Fc 1-18 L/S VH-LL4-VL RibobNAb | 0 | 85.8 | 14.2 |
| scFv-Fc 1-18 L/S VH-LL5-VL RibobNAb | 0 | 86 | 14 |
| scFv-Fc 1-18 L/S VL-LL4-VH RibobNAb | 0 | 86.7 | 13.3 |
| scFv-Fc 1-18 L/S VL-LL5-VH RibobNAb | 0 | 88.5 | 11.5 |
| 1-18 L/S (IgG) RibobNAb | 0 | 74.7 | 25.3 |
| Control IgG RiboMab | 0 | 73.7 | 17.8 |

### Neutralization Studies

[1212] A TZM-bl pseudovirus neutralizing assay (pVNT assay) was used to determine the neutralization capacity of scFv-Fc 1-18 antibody agents (e.g., as described in Sarzotti-Kelsoe et al., 2014. Journal of immunological methods). TZM-bl cells are engineered to express CD4, CCR5, and CXCR4 and to contain integrated reporter genes for firefly Luc and E. coli β-galactosidase under the control of an HIV-1 long terminal repeat.

[1213] Briefly, HEK293T/17 cells were transfected with RNA which encoded for IgG RibobNAb antibody agent. HEK293T/17 cells were then cultured under suitable conditions and for a suitable length of time so as to allow for RibobNAb production and secretion into the cell culture supernatant. HEK293T/17 cell culture supernatant was then harvested and added to TZM-bl cells at the same time that samples containing virus were added to TZM-bl cells. The TZM-bl cells were then incubated for about 48 hours, followed by addition of a Luc reporter gene assay system reagent. Virus infectivity was measured in relative luminescence units (RLU).

[1214] In detail: Pseudovirus generation: HIV-1 Env pseudotyped viruses were prepared by co-transfecting exponentially dividing HEK293T/17 cells (5×10⁶ cells in 15 ml growth medium in a T-75 culture flask) with 4 g of rev/env expression plasmid and 8 g of an env-deficient HIV-1 backbone vector (pSG3Δenv) using FuGENE 6 reagent (Promega, USA) in growth medium, as described by the manufacturer. Virus-containing culture supernatants were recovered from the flasks and filtered through a 0.45 m filter. Env-pseudotyped virus stocks were titrated by performing serial 5-fold dilutions in growth medium in 96-well culture plates (11 dilution steps total). Freshly trypsinized TZM-bl cells (10,000 cells in 100 μl volume) were added to each well in growth medium containing an optimized concentration of DEAE-dextran and incubated for 48 hrs. 100 μl of culture supernatant was removed from each well and replaced with a Luc reporter gene assay system reagent (Brite-Glo, Promega, used as per manufacturer's recommendation). After a 2-min incubation at room temperature to allow cell lysis, 150 μl of cell lysate was transferred to 96-well black solid plates (Corning-Costar) for measurements of luminescence. For each Env pseudotyped virus an optimal dilution to use in the TZM-bl assay (expressed as RLU equivalent) was calculated to ensure a standardized virus dose.

[1215] pVNT assay: HEK293T/17 cells were transfected with RNA which encoded for IgG RibobNAb antibody agent. HEK293T/17 cells were then cultured under suitable conditions and for a suitable length of time so as to allow for RibobNAb production and secretion into the cell culture supernatant. Supernatants from cells transfected with polyribonucleotides or purified IgG samples were tested at indicated primary dilutions/concentrations and serially diluted 3-fold 7-times in duplicate wells. Diluted samples were mixed with an optimal titer of Env-pseudotyped virus and co-incubated at 37° C. for 1 h. TZM-bl cells were then added at a final concentration of 10⁴ cells per well in a 96-well plate in medium supplemented with DEAE-dextran for 48 hrs at 37° C. and 5% CO2. 100 μl of culture supernatant was removed from each well and replaced with a Luc reporter gene assay system reagent (Brite-Glo, Promega, used as per manufacturer's recommendation). After a 2-min incubation at room temperature to allow cell lysis, 150 μl of cell lysate was transferred to 96-well black solid plates (Corning-Costar) for measurements of luminescence. After subtracting background relative luminescence units (RLUs) of non-infected TZM-bl cells, 50% and 80% inhibitory concentrations (IC50s and IC80s) were determined as the antibody/IgG concentrations resulting in a 50%/80% RLU reduction compared to untreated virus control wells. The following HIV-1 Env pseudovirus isolates were selected for testing against cell supernatants or purified IgG: CNE19 (clade B), q23.17 (clade A1), Tro.11 (clade B), RHPA4259.7 (clade B), R2184_C4 (clade CRF01_AE), 6540_V4_C1 (clade CRF01_AC), CAP304_2_00_F6_6 (Clade C), CE1176_A3 (Clade C), 6980.V0.C31 (Clade C), 1012_11_TC21_3257 (Clade B), and PVO.4 (Clade B). A Murine Leukemia Virus (MuLV) pseudovirus was used as a negative control.

[1216] Results from the pVNT assays showed that scFv-Fc 1-18 L/S antibody agents had good breadth and potency (FIG. 21 and FIG. 22).

### Example 7: In Vitro Validation of CrossMab 1-18 L/S Antibody Agents Delivered to Cells Using RNA Constructs

Expression and Neutralization Analysis of 1-18 CrossMab^{CH1-CLx} and 1-18 CrossMab^{CH1-CLcv} Antibody Agents Delivered to Cells Using RNA Constructs

[1217] Generation of polyribonucleotides encoding for 1-18 antibody agents as described herein allows the 1-18 agents to be delivered in combination with other polyribonucleotides that encode additional anti-HIV antibody agents. Use of the technologies and approaches described herein also allows for simultaneous production of different antibody agents from polyribonucleotides. The formats of antibody agents have been designed to minimize or eliminate the risk of immunoglobulin chain mispairing. Being able to combine multiple antibody agent formulations as described herein (e.g., including an 1-18 antibody agent) allows for the development of a composition (e.g., a pharmaceutical composition) that delivers multiple antibody agents together so that they can bind different epitopes of the HIV virus, thereby minimizing viral escape through mutations.

[1218] In order to determine whether polyribonucleotides encoding CrossMab 1-18 L/S antibody agents, as described herein, can induce the production of the CrossMab 1-18 L/S antibody agents, the expression and neutralization capabilities of the CrossMab 1-18 L/S antibody agents were tested.

[1219] Objectives of this Example include:
[1220] (1) Evaluate the expression and aggregation of CrossMab 1-18 L/S antibody agents by Gyros and Western Blot; and
[1221] (2) Test the influence of different domain swaps and charge variations on the production and functionality of scFv-Fc 1-18 L/S antibody agents.

[1222] In this Example, HEK293T/17 cells were electroporated with polyribonucleotides encoding various CrossMab 1-18 L/S antibody agents and a control RiboMab01 (1.5:1 HC/LC). The CrossMab 1-18 L/S antibody agent concentration in the supernatant was determined by GYROS ELISA. A non-reducing denaturing Western blot analysis was also performed to check the ratio of antibody agents produced as compared to HMW aggregates and free chains.

### Methods

[1223] Electroporation, Gyros ELISA for RibobNAb Quantification, and Western Blot Analysis of RibobNAbs in Cell Culture Supernatants were performed as described above in Example 5.

### Results

[1224] The results from the Gyros ELISA are shown in FIG. 16. The results from the Gyros ELISA showed that all 1-18 CrossMab^{CH1-CLx} and 1-18 CrossMab^{CH1-CLcv} antibody agents were successfully expressed and produced in HEK-293T/17 cells. Additionally, 1-18 CrossMab^{CH1-CLx} L/S is expressed at a level about 3 times lower compared to the reference control (1-18 L/S IgG antibody agent) and the 1-18 CrossMab^{CH1-CLcv} antibody agent.

[1225] The results from the Western Blot analysis are shown in FIG. 17. Western Blot semi-quantitative HMW analysis summary is shown in Table 19 below. The Western Blot Analysis showed that all 1-18 CrossMab^{CH1-CLx} and 1-18 CrossMab^{CH1-CLcv} antibody agents, except for the 1-18 CrossMab^{CH1-CLx} L/S antibody agent, were correctly assembled and show no aggregates or HMW aggregates. Additionally, the 1-18 CrossMab^{CH1-CLx} L/S antibody agent has prominent byproducts at 100 and 125 kDa.

TABLE 19
Western Blot semi-quantitative HMW analysis summary

| | % | % | % |
|---|---|---|---|
| Sample Name | HMW | Monomer | LMW |
| IgG rec. Protein Control | 0 | 88.3 | 11.7 |
| CrossMab 1-18 L/S CH1-CLx RibobNAb | 0 | 44.8 | 55.2 |
| CrossMab 1-18 L/S CH1-CLcv RibobNAb | 0 | 81.3 | 18.7 |
| 1-18 L/S RibobNAb | 0 | 82.7 | 17.3 |
| IgG RiboMab Control | 0 | 85.7 | 14.3 |

### Neutralization Studies

[1226] A TZM-bl pseudovirus neutralizing assay (pVNT assay) was used to determine the neutralization capacity of 1-18 CrossMab antibody agents (e.g., as described in Sarzotti-Kelsoe et al., 2014. Journal of immunological methods). TZM-bl cells are engineered to express CD4, CCR5, and CXCR4 and to contain integrated reporter genes for firefly Luc and E. coli β-galactosidase under the control of an HIV-1 long terminal repeat.

[1227] Briefly, HEK293T/17 cells were transfected with RNA which encoded for IgG RibobNAb antibody agent. HEK293T/17 cells were then cultured under suitable conditions and for a suitable length of time so as to allow for RibobNAb production and secretion into the cell culture supernatant. HEK293T/17 cell culture supernatant was then harvested and added to TZM-bl cells at the same time that samples containing virus were added to TZM-bl cells. The TZM-bl cells were then incubated for about 48 hours, followed by addition of a Luc reporter gene assay system reagent. Virus infectivity was measured in relative luminescence units (RLU).

[1228] In detail: Pseudovirus generation: HIV-1 Env pseudotyped viruses were prepared by co-transfecting exponentially dividing HEK293T/17 cells (5×10⁶ cells in 15 ml growth medium in a T-75 culture flask) with 4 g of rev/env expression plasmid and 8 g of an env-deficient HIV-1 backbone vector (pSG3Δenv) using FuGENE 6 reagent (Promega, USA) in growth medium, as described by the manufacturer. Virus-containing culture supernatants were recovered from the flasks and filtered through a 0.45 m filter. Env-pseudotyped virus stocks were titrated by performing serial 5-fold dilutions in growth medium in 96-well culture plates (11 dilution steps total). Freshly trypsinized TZM-bl cells (10,000 cells in 100 μl volume) were added to each well in growth medium containing an optimized concentration of DEAE-dextran and incubated for 48 hrs. 100 μl of culture supernatant was removed from each well and replaced with a Luc reporter gene assay system reagent (Brite-Glo, Promega, used as per manufacturer's recommendation). After a 2-min incubation at room temperature to allow cell lysis, 150 μl of cell lysate was transferred to 96-well black solid plates (Corning-Costar) for measurements of luminescence. For each Env pseudotyped virus an optimal dilution to use in the TZM-bl assay (expressed as RLU equivalent) was calculated to ensure a standardized virus dose.

[1229] pVNT assay: HEK293T/17 cells were transfected with RNA which encoded for IgG RibobNAb antibody agent. HEK293T/17 cells were then cultured under suitable conditions and for a suitable length of time so as to allow for RibobNAb production and secretion into the cell culture supernatant.

[1230] Supernatants from cells electroporated with polyribonucleotides or purified IgG samples were tested at indicated primary dilutions/concentrations and serially diluted 3-fold 7-times in duplicate wells. Diluted samples were mixed with an optimal titer of Env-pseudotyped virus and co-incubated at 37° C. for 1 h. TZM-bl cells were then added at a final concentration of 10⁴ cells per well in a 96-well plate in medium supplemented with DEAE-dextran for 48 hrs at 37° C. and 5% CO2. 100 μl of culture supernatant was removed from each well and replaced with a Luc reporter gene assay system reagent (Brite-Glo, Promega, used as per manufacturer's recommendation). After a 2-min incubation at room temperature to allow cell lysis, 150 μl of cell lysate was transferred to 96-well black solid plates (Corning-Costar) for measurements of luminescence. After subtracting background relative luminescence units (RLUs) of non-infected TZM-bl cells, 50% and 80% inhibitory concentrations (IC50s and IC80s) were determined as the antibody/IgG concentrations resulting in a 50%/80% RLU reduction compared to untreated virus control wells. The following HIV-1 Env pseudovirus isolates were selected for testing against cell supernatants or purified IgG: CNE19 (clade B), q23.17 (clade A1), Tro.11 (clade B), RHPA4259.7 (clade B), R2184_C4 (clade CRF01_AE), and 6540_V4_C1 (clade CRF01_AC). A Murine Leukemia Virus (MuLV) pseudovirus was used as a negative control.

[1231] Results from the pVNT assays showed that 1-18 CrossMab^{CH1-CLx} antibody agent and 1-18 CrossMab^{CH1-CLcv} antibody agent had good breadth and potency (FIG. 23).

### Example 8: In Vivo Validation of Parental and Mutated 1-18 RibobNAbs

[1232] Generation of polyribonucleotides encoding for 1-18 antibody agents as described herein allows the 1-18 agents to be delivered in combination with other polyribonucleotides that encode additional anti-HIV antibody agents. Use of the technologies and approaches described herein also allows for simultaneous production of different antibody agents from polyribonucleotides. The formats of antibody agents have been designed to minimize or eliminate the risk of immunoglobulin chain mispairing. Being able to combine multiple antibody agent formulations as described herein (e.g., including an 1-18 antibody agent) allows for the development of a composition (e.g., a pharmaceutical composition) that delivers multiple antibody agents together so that they can bind different epitopes of the HIV virus, thereby minimizing viral escape through mutations.

[1233] The present Example shows that polyribonucleotides encoding 1-18 antibody agents can induce production of 1-18 antibody agents in vivo. Furthermore, the present Example shows that polyribonucleotides encoding 1-18 antibody agents can drive a high antibody titer in the serum of test subjects over a period of time. A mutation (“L/S”) was introduced in the CH3 domain of certain antibody agents to improve binding to the FcRn receptor and thereby improve the terminal kinetic and increase the half-life of the antibody agent (see, for example, Zalevsky et al., 2010, Nature biotechnology). In this Example, the pharmacokinetic properties of 1-18 and 1-18 L/S IgG antibody agents were evaluated to assess the mutation's effect on such antibody qualities. NSG hFcRn TG32 mice were used, where the murine FcRn receptor has been exchanged to the human version.

[1234] Analyzing the concentration of the 1-18 Antibody and L/S mutated 1-18 Antibody in serum of NSG hFcRn Tg32 mice.

[1235] NSG hFcRn TG32 mice were injected intravenously with LNP-encapsulated polyribonucleotides encoding 1-18 IgG (comprising amino acid sequences represented in SEQ ID NOs: 614 and 620, and the ribopolynucleotide construct sequences SEQ ID NOs: 454 and 458) and 1-18 L/S IgG (comprising amino acid sequences represented in SEQ ID NOs: 617 and 620, and the ribopolynucleotide construct sequences SEQ ID NOs: 455 and 458) antibody agents (1.5:1 HC/LC) in 150 μL of PBS. Blood was sampled from the mice at various time points, and serum was analyzed for the abundance of the RibobNAbs over a time period of 33 days with Gyros ELISA, as described herein.

### Results

[1236] The results are presented in FIG. 18 in log scale. The 1-18 IgG antibody agent had a similar pharmacokinetic profile to the control, RiboMab01. Furthermore, the 1-18 L/S IgG antibody agent displayed improved pharmacokinetics as compared to the 1-18 IgG antibody agent, confirming that the L/S mutation can indeed extend antibody half-life. In particular, the 1-18 L/S IgG antibody agent had, on average, roughly 10 fold greater concentration in vivo on day 33 post-injection as compared to 1-18 IgG antibody agent.

### Example 9: Generation of Polyribonucleotides Encoding 1-18 IgG Antibody Agents

[1237] The present Example demonstrates the generation of polyribonucleotide sequences encoding an anti-HIV antibody agent. The present Example further demonstrates that such polyribonucleotides are designed so that transient in vivo antibody agent production following i.v./i.m./s.c. delivery of the one or more polyribonucleotides is achieved.

[1238] Specifically, ribonucleic acid sequences encoding the heavy and light chain variable domains of 1-18 recombinantly combine with other immunoglobulin domains to form polyribonucleotides that encode 1-18 antibody agent immunoglobulin chains. The resulting polyribonucleotides are cloned into the JR81 DNA plasmid. The polyribonucleotides encode 1-18 antibody agents having different formats, including a conventional IgG1, an scFv-Fc, a CrossMab^{CH1-CLx}, a CrossMab^{CH1-CLcv}, and knob-in-hole formats (see e.g., FIGS. 4-5). Exemplary 1-18 antibody agent configurations and component immunoglobulin chains are shown in Table 2.

[1239] Methods of the present example include:
[1240] (1) Cloning of DNA fragments into a DNA plasmid appropriate to use for RNA expression (e.g., JR81); and
[1241] (2) Verification of selected clones by control digestion and sequencing.

[1242] An appropriate DNA plasmid may encode RNA features including, for example, a 5′ untranslated region (e.g., one that is derived from human a-globin mRNA (hAg)), a Kozak sequence, a signal peptide sequence (e.g., husec2)), and/or a 3′ untranslated region (e.g., one that is a combination of two sequence elements (FI element) and/or a polyA tail 30Linker70 (A30L70)). Examples of appropriate DNA plasmids can be found in WO2021214204A1, which is hereby incorporated by reference in its entirety.

### Codon Optimization and Cloning Strategy

[1243] Codon optimization and cloning are performed as described above in Example 92.

[1244] Exemplary sequences used in the cloning methods above are shown in Table 20 below. Exemplary nucleotide sequences of the resulting heavy chain- and light chain-encoding plasmid constructs as well as the sequence of the backbone can be found in SEQ ID NOs: 669-699 (heavy chain) and SEQ ID NO: 458 (light chain).

TABLE 20
Exemplary sequences in 1-18 antibody agent encoding polyribonucleotides.

| Feature | Fragment | Nucleotide Sequence |
|---|---|---|
| General | CH1-Hinge-CH2 | GCCTCTACAAAGGGCCCTAGCGTGTTCCCTCTGGCTCCTAGCAGCAAGT |
| | (GAIE)-CH3 (LS) | CGACATCTGGCGGAACAGCCGCTCTGGGCTGTCTGGTCAAGGACTACT |
| | (G1m3) | TTCCCGAGCCTGTGACAGTGTCCTGGAACTCTGGCGCTCTGACAAGCG |
| | | GCGTGCACACATTTCCAGCCGTGCTGCAAAGCAGCGGCCTGTACTCTCT |
| | | GAGCAGCGTGGTCACAGTGCCAAGCTCTAGCCTGGGCACCCAGACCTA |
| | | CATCTGCAATGTGAACCACAAGCCTAGCAACACCAAGGTGGACAAGAG |
| | | AGTGGAACCCAAGAGCTGCGACAAGACCCACACCTGTCCTCCATGTCCT |
| | | GCTCCAGAACTGCTGGCCGGACCTTCCGTGTTCCTGTTTCCTCCAAAG |
| | | CCTAAGGACACCCTGATGATCAGCAGAACCCCTGAAGTGACCTGCGT |
| | | GGTGGTGGATGTGTCTCACGAGGACCCTGAAGTGAAGTTCAATTGGT |
| | | ACGTGGACGGCGTGGAAGTGCACAACGCCAAGACCAAGCCTAGAGA |
| | | GGAACAGTACAACAGCACCTACAGAGTGGTGTCCGTGCTGACCGTGC |
| | | TGCACCAGGATTGGCTGAACGGCAAAGAGTACAAGTGCAAGGTGTC |
| | | CAACAAGGCCCTGCCTGCCCCTGAGGAAAAGACCATCAGCAAGGCCA |
| | | AGGGCCAGCCTAGGGAACCCCAGGTTTACACACTGCCTCCAAGCCGCG |
| | | AGGAAATGACCAAGAACCAGGTGTCCCTGACCTGCCTCGTGAAGGGCT |
| | | TCTACCCTTCCGATATCGCCGTGGAATGGGAGAGCAATGGCCAGCCTG |
| | | AGAACAACTACAAGACAACCCCTCCTGTGCTGGACAGCGACGGCTCAT |
| | | TCTTCCTGTACAGCAAGCTGACCGTGGACAAGTCCAGATGGCAGCAGG |
| | | GCAACGTGTTCAGCTGTAGCGTGCTGCACGAAGCCCTGCACAGCCACT |
| | | ACACCCAGAAAAGCCTGTCTCTGAGCCCCGGCAAATGATAA |
| | | (SEQ ID NO: 512) |
| | CH1-Hinge-CH2-CH3 | GCCTCTACAAAGGGCCCTAGCGTGTTCCCTCTGGCTCCTAGCAGCAAGT |
| | (G1m17) | CGACATCTGGCGGAACAGCCGCTCTGGGCTGTCTGGTCAAGGACTACTT |
| | | TCCCGAGCCTGTGACAGTGTCCTGGAACTCTGGCGCTCTGACAAGCGGC |
| | | GTGCACACATTTCCAGCCGTGCTGCAAAGCAGCGGCCTGTACTCTCTGA |
| | | GCAGCGTGGTCACAGTGCCAAGCTCTAGCCTGGGCACCCAGACCTACAT |
| | | CTGCAATGTGAACCACAAGCCTAGCAACACCAAGGTGGACAAGAAGGT |
| | | GGAACCCAAGAGCTGCGACAAGACCCACACCTGTCCTCCATGTCCTGCT |
| | | CCAGAACTGCTCGGCGGACCTTCCGTGTTCCTGTTTCCTCCAAAGCCTA |
| | | AGGACACCCTGATGATCAGCAGAACCCCTGAAGTGACCTGCGTGGTGG |
| | | TGGATGTGTCTCACGAGGACCCAGAAGTGAAGTTCAATTGGTACGTGG |
| | | ACGGCGTGGAAGTGCACAACGCCAAGACCAAGCCTAGAGAGGAACA |
| | | GTACAACAGCACCTACAGAGTGGTGTCCGTGCTGACAGTGCTGCACCA |
| | | GGATTGGCTGAACGGCAAAGAGTACAAGTGCAAGGTGTCCAACAAGG |
| | | CCCTGCCTGCTCCTATCGAGAAAACCATCAGCAAGGCCAAGGGCCAGC |
| | | CTAGGGAACCCCAGGTTTACACACTGCCTCCAAGCCGCGAGGAAATGAC |
| | | CAAGAACCAGGTGTCCCTGACCTGCCTCGTGAAGGGCTTCTACCCTTCCG |
| | | ATATCGCCGTGGAATGGGAGAGCAATGGCCAGCCTGAGAACAACTACAA |
| | | GACAACCCCTCCTGTGCTGGACAGCGACGGCTCATTCTTCCTGTACAGCA |
| | | AGCTGACTGTGGATAAGTCCCGGTGGCAGCAGGGCAACGTGTTCAGCT |
| | | GTTCTGTGATGCACGAAGCCCTGCACAACCACTACACCCAGAAAAGCCT |
| | | GTCTCTGAGCCCCGGCAAGTGATAA |
| | | (SEQ ID NO: 513) |
| | CH1-Hinge-CH2-CH3 | GCCTCTACAAAGGGCCCTAGCGTGTTCCCTCTGGCTCCTAGCAGCAAGT |
| | (LS) (G1m17) | CGACATCTGGCGGAACAGCCGCTCTGGGCTGTCTGGTCAAGGACTACT |
| | | TTCCCGAGCCTGTGACAGTGTCCTGGAACTCTGGCGCTCTGACAAGCG |
| | | GCGTGCACACATTTCCAGCCGTGCTGCAAAGCAGCGGCCTGTACTCTCT |
| | | GAGCAGCGTGGTCACAGTGCCAAGCTCTAGCCTGGGCACCCAGACCTA |
| | | CATCTGCAATGTGAACCACAAGCCTAGCAACACCAAGGTGGACAAGAA |
| | | GGTGGAACCCAAGAGCTGCGACAAGACCCACACCTGTCCTCCATGTCC |
| | | TGCTCCAGAACTGCTCGGCGGACCTTCCGTGTTCCTGTTTCCTCCAAAG |
| | | CCTAAGGACACCCTGATGATCAGCAGAACCCCTGAAGTGACCTGCGT |
| | | GGTGGTGGATGTGTCTCACGAGGACCCAGAAGTGAAGTTCAATTGGT |
| | | ACGTGGACGGCGTGGAAGTGCACAACGCCAAGACCAAGCCTAGAGA |
| | | GGAACAGTACAACAGCACCTACAGAGTGGTGTCCGTGCTGACAGTGC |
| | | TGCACCAGGATTGGCTGAACGGCAAAGAGTACAAGTGCAAGGTGTC |
| | | CAACAAGGCCCTGCCTGCTCCTATCGAGAAAACCATCAGCAAGGCCA |
| | | AGGGCCAGCCTAGGGAACCCCAGGTTTACACACTGCCTCCAAGCCGCG |
| | | AGGAAATGACCAAGAACCAGGTGTCCCTGACCTGCCTCGTGAAGGGCT |
| | | TCTACCCTTCCGATATCGCCGTGGAATGGGAGAGCAATGGCCAGCCTG |
| | | AGAACAACTACAAGACAACCCCTCCTGTGCTGGACAGCGACGGCTCAT |
| | | TCTTCCTGTACAGCAAGCTGACCGTGGACAAGTCCAGATGGCAGCAGG |
| | | GCAACGTGTTCAGCTGTAGCGTGCTGCACGAAGCCCTGCACAGCCACT |
| | | ACACCCAGAAAAGCCTGTCTCTGAGCCCCGGCAAATGATAA |
| | | (SEQ ID NO: 514) |
| | CH1-Hinge-CH2-CH3 | GCCTCTACAAAGGGCCCTAGCGTGTTCCCTCTGGCTCCTAGCAGCAAGT |
| | (cak-LS) (G1m17) | CGACATCTGGCGGAACAGCCGCTCTGGGCTGTCTGGTCAAGGACTACTT |
| | | TCCCGAGCCTGTGACAGTGTCCTGGAACTCTGGCGCTCTGACAAGCGGC |
| | | GTGCACACATTTCCAGCCGTGCTGCAAAGCAGCGGCCTGTACTCTCTGA |
| | | GCAGCGTGGTCACAGTGCCAAGCTCTAGCCTGGGCACCCAGACCTACAT |
| | | CTGCAATGTGAACCACAAGCCTAGCAACACCAAGGTGGACAAGAAGGT |
| | | GGAACCCAAGAGCTGCGACAAGACCCACACCTGTCCTCCATGTCCTGCT |
| | | CCAGAACTGCTCGGCGGACCTTCCGTGTTCCTGTTTCCTCCAAAGCCTA |
| | | AGGACACCCTGATGATCAGCAGAACCCCTGAAGTGACCTGCGTGGTGG |
| | | TGGATGTGTCTCACGAGGACCCAGAAGTGAAGTTCAATTGGTACGTGG |
| | | ACGGCGTGGAAGTGCACAACGCCAAGACCAAGCCTAGAGAGGAACA |
| | | GTACAACAGCACCTACAGAGTGGTGTCCGTGCTGACAGTGCTGCACCA |
| | | GGATTGGCTGAACGGCAAAGAGTACAAGTGCAAGGTGTCCAACAAGG |
| | | CCCTGCCTGCTCCTATCGAGAAAACCATCAGCAAGGCCAAGGGCCAGC |
| | | CTAGGGAACCCCAGGTTTACACCCTGCCTCCATGCCGCGAGGAAATGAC |
| | | CAAGAACCAGGTGTCCCTGTGGTGCCTGGTCAAGGGCTTCTACCCTTCC |
| | | GATATCGCCGTGGAATGGGAGAGCAATGGCCAGCCTGAGAACAACTACA |
| | | AGACAACCCCTCCTGTGCTGGACAGCGACGGCTCATTCTTCCTGTACAGC |
| | | AAGCTGACAGTGGACAAGAGCAGATGGCAGCAGGGCAACGTGTTCAGC |
| | | TGCAGCGTGCTGCATGAAGCCCTGCACAGCCACTACACCCAGAAGTCCCT |
| | | GTCTCTGAGCCCCGGCAAGTGATAA |
| | | (SEQ ID NO: 515) |
| | CH1-Hinge-CH2 | GCCTCTACAAAGGGCCCTAGCGTGTTCCCTCTGGCTCCTAGCAGCAAGT |
| | (GAALIE)-CH3 (LS) | CGACATCTGGCGGAACAGCCGCTCTGGGCTGTCTGGTCAAGGACTACTT |
| | (G1m17) | TCCCGAGCCTGTGACAGTGTCCTGGAACTCTGGCGCTCTGACAAGCGGC |
| | | GTGCACACATTTCCAGCCGTGCTGCAAAGCAGCGGCCTGTACTCTCTGA |
| | | GCAGCGTGGTCACAGTGCCAAGCTCTAGCCTGGGCACCCAGACCTACAT |
| | | CTGCAATGTGAACCACAAGCCTAGCAACACCAAGGTGGACAAGAAGGT |
| | | GGAACCCAAGAGCTGCGACAAGACCCACACCTGTCCTCCATGTCCTGCT |
| | | CCAGAACTGCTGGCCGGACCTTCCGTGTTCCTGTTTCCTCCAAAGCCTA |
| | | AGGACACCCTGATGATCAGCAGAACCCCTGAAGTGACCTGCGTGGTGG |
| | | TGGATGTGTCTCACGAGGACCCTGAAGTGAAGTTCAATTGGTACGTGG |
| | | ACGGCGTGGAAGTGCACAACGCCAAGACCAAGCCTAGAGAGGAACA |
| | | GTACAACAGCACCTACAGAGTGGTGTCCGTGCTGACCGTGCTGCACCA |
| | | GGATTGGCTGAACGGCAAAGAGTACAAGTGCAAGGTGTCCAACAAGG |
| | | CCCTGCCTCTGCCTGAGGAAAAGACCATCAGCAAGGCCAAGGGCCAG |
| | | CCTAGGGAACCCCAGGTTTACACACTGCCTCCAAGCCGCGAGGAAATGA |
| | | CCAAGAACCAGGTGTCCCTGACCTGCCTCGTGAAGGGCTTCTACCCTTCC |
| | | GATATCGCCGTGGAATGGGAGAGCAATGGCCAGCCTGAGAACAACTACA |
| | | AGACAACCCCTCCTGTGCTGGACAGCGACGGCTCATTCTTCCTGTACAGC |
| | | AAGCTGACCGTGGACAAGTCCAGATGGCAGCAGGGCAACGTGTTCAGC |
| | | TGTAGCGTGCTGCACGAAGCCCTGCACAGCCACTACACCCAGAAAAGCC |
| | | TGTCTCTGAGCCCCGGCAAATGATAA |
| | | (SEQ ID NO: 516) |
| | CH1-Hinge-CH2 | GCCTCTACAAAGGGCCCTAGCGTGTTCCCTCTGGCTCCTAGCAGCAAGT |
| | (GAIE)-CH3 (LS) | CGACATCTGGCGGAACAGCCGCTCTGGGCTGTCTGGTCAAGGACTACTT |
| | (G1m17) | TCCCGAGCCTGTGACAGTGTCCTGGAACTCTGGCGCTCTGACAAGCGGC |
| | | GTGCACACATTTCCAGCCGTGCTGCAAAGCAGCGGCCTGTACTCTCTGA |
| | | GCAGCGTGGTCACAGTGCCAAGCTCTAGCCTGGGCACCCAGACCTACAT |
| | | CTGCAATGTGAACCACAAGCCTAGCAACACCAAGGTGGACAAGAAGGT |
| | | GGAACCCAAGAGCTGCGACAAGACCCACACCTGTCCTCCATGTCCTGCT |
| | | CCAGAACTGCTGGCCGGACCTTCCGTGTTCCTGTTTCCTCCAAAGCCTA |
| | | AGGACACCCTGATGATCAGCAGAACCCCTGAAGTGACCTGCGTGGTGG |
| | | TGGATGTGTCTCACGAGGACCCTGAAGTGAAGTTCAATTGGTACGTGG |
| | | ACGGCGTGGAAGTGCACAACGCCAAGACCAAGCCTAGAGAGGAACA |
| | | GTACAACAGCACCTACAGAGTGGTGTCCGTGCTGACCGTGCTGCACCA |
| | | GGATTGGCTGAACGGCAAAGAGTACAAGTGCAAGGTGTCCAACAAGG |
| | | CCCTGCCTGCCCCTGAGGAAAAGACCATCAGCAAGGCCAAGGGCCAG |
| | | CCTAGGGAACCCCAGGTTTACACACTGCCTCCAAGCCGCGAGGAAATGA |
| | | CCAAGAACCAGGTGTCCCTGACCTGCCTCGTGAAGGGCTTCTACCCTTCC |
| | | GATATCGCCGTGGAATGGGAGAGCAATGGCCAGCCTGAGAACAACTACA |
| | | AGACAACCCCTCCTGTGCTGGACAGCGACGGCTCATTCTTCCTGTACAGC |
| | | AAGCTGACCGTGGACAAGTCCAGATGGCAGCAGGGCAACGTGTTCAGC |
| | | TGTAGCGTGCTGCACGAAGCCCTGCACAGCCACTACACCCAGAAAAGCC |
| | | TGTCTCTGAGCCCCGGCAAATGATAA |
| | | (SEQ ID NO: 517) |
| | CH1-Hinge-CH2-CH3 | GCCTCTACAAAGGGCCCTAGCGTGTTCCCTCTGGCTCCTAGCAGCAAGT |
| | (G1m17, 1) | CGACATCTGGCGGAACAGCCGCTCTGGGCTGTCTGGTCAAGGACTACTT |
| | | TCCCGAGCCTGTGACAGTGTCCTGGAACTCTGGCGCTCTGACAAGCGGC |
| | | GTGCACACATTTCCAGCCGTGCTGCAAAGCAGCGGCCTGTACTCTCTGA |
| | | GCAGCGTGGTCACAGTGCCAAGCTCTAGCCTGGGCACCCAGACCTACAT |
| | | CTGCAATGTGAACCACAAGCCTAGCAACACCAAGGTGGACAAGAAGGT |
| | | GGAACCCAAGAGCTGCGACAAGACCCACACCTGTCCTCCATGTCCTGCT |
| | | CCAGAACTGCTCGGCGGACCTTCCGTGTTCCTGTTTCCTCCAAAGCCTA |
| | | AGGACACCCTGATGATCAGCAGAACCCCTGAAGTGACCTGCGTGGTGG |
| | | TGGATGTGTCTCACGAGGACCCAGAAGTGAAGTTCAATTGGTACGTGG |
| | | ACGGCGTGGAAGTGCACAACGCCAAGACCAAGCCTAGAGAGGAACA |
| | | GTACAACAGCACCTACAGAGTGGTGTCCGTGCTGACAGTGCTGCACCA |
| | | GGATTGGCTGAACGGCAAAGAGTACAAGTGCAAGGTGTCCAACAAGG |
| | | CCCTGCCTGCTCCTATCGAGAAAACCATCAGCAAGGCCAAGGGCCAGC |
| | | CTAGGGAACCCCAGGTTTACACACTGCCTCCAAGCCGCGACGAACTGAC |
| | | CAAGAACCAGGTGTCCCTGACCTGCCTCGTGAAGGGCTTCTACCCTTCCG |
| | | ATATCGCCGTGGAATGGGAGAGCAATGGCCAGCCTGAGAACAACTACAA |
| | | GACAACCCCTCCTGTGCTGGACAGCGACGGCTCATTCTTCCTGTACAGCA |
| | | AGCTGACTGTGGATAAGTCCCGGTGGCAGCAGGGCAACGTGTTCAGCT |
| | | GTTCTGTGATGCACGAAGCCCTGCACAACCACTACACCCAGAAAAGCCT |
| | | GTCTCTGAGCCCCGGCAAGTGATAA |
| | | (SEQ ID NO: 518) |
| | CH1-Hinge-CH2-CH3 | GCCTCTACAAAGGGCCCTAGCGTGTTCCCTCTGGCTCCTAGCAGCAAGT |
| | (LS) (G1m17, 1) | CGACATCTGGCGGAACAGCCGCTCTGGGCTGTCTGGTCAAGGACTACT |
| | | TTCCCGAGCCTGTGACAGTGTCCTGGAACTCTGGCGCTCTGACAAGCG |
| | | GCGTGCACACATTTCCAGCCGTGCTGCAAAGCAGCGGCCTGTACTCTCT |
| | | GAGCAGCGTGGTCACAGTGCCAAGCTCTAGCCTGGGCACCCAGACCTA |
| | | CATCTGCAATGTGAACCACAAGCCTAGCAACACCAAGGTGGACAAGAA |
| | | GGTGGAACCCAAGAGCTGCGACAAGACCCACACCTGTCCTCCATGTCC |
| | | TGCTCCAGAACTGCTCGGCGGACCTTCCGTGTTCCTGTTTCCTCCAAAG |
| | | CCTAAGGACACCCTGATGATCAGCAGAACCCCTGAAGTGACCTGCGT |
| | | GGTGGTGGATGTGTCTCACGAGGACCCAGAAGTGAAGTTCAATTGGT |
| | | ACGTGGACGGCGTGGAAGTGCACAACGCCAAGACCAAGCCTAGAGA |
| | | GGAACAGTACAACAGCACCTACAGAGTGGTGTCCGTGCTGACAGTGC |
| | | TGCACCAGGATTGGCTGAACGGCAAAGAGTACAAGTGCAAGGTGTC |
| | | CAACAAGGCCCTGCCTGCTCCTATCGAGAAAACCATCAGCAAGGCCA |
| | | AGGGCCAGCCTAGGGAACCCCAGGTTTACACACTGCCTCCAAGCCGCG |
| | | ACGAACTGACCAAGAACCAGGTGTCCCTGACCTGCCTCGTGAAGGGCT |
| | | TCTACCCTTCCGATATCGCCGTGGAATGGGAGAGCAATGGCCAGCCTG |
| | | AGAACAACTACAAGACAACCCCTCCTGTGCTGGACAGCGACGGCTCAT |
| | | TCTTCCTGTACAGCAAGCTGACCGTGGACAAGTCCAGATGGCAGCAGG |
| | | GCAACGTGTTCAGCTGTAGCGTGCTGCACGAAGCCCTGCACAGCCACT |
| | | ACACCCAGAAAAGCCTGTCTCTGAGCCCCGGCAAATGATAA |
| | | (SEQ ID NO: 519) |
| | CH1-Hinge-CH2-CH3 | GCCTCTACAAAGGGCCCTAGCGTGTTCCCTCTGGCTCCTAGCAGCAAGT |
| | (cak-LS) | CGACATCTGGCGGAACAGCCGCTCTGGGCTGTCTGGTCAAGGACTACT |
| | (G1m17, 1) | TTCCCGAGCCTGTGACAGTGTCCTGGAACTCTGGCGCTCTGACAAGCG |
| | | GCGTGCACACATTTCCAGCCGTGCTGCAAAGCAGCGGCCTGTACTCTCT |
| | | GAGCAGCGTGGTCACAGTGCCAAGCTCTAGCCTGGGCACCCAGACCTA |
| | | CATCTGCAATGTGAACCACAAGCCTAGCAACACCAAGGTGGACAAGAA |
| | | GGTGGAACCCAAGAGCTGCGACAAGACCCACACCTGTCCTCCATGTCC |
| | | TGCTCCAGAACTGCTCGGCGGACCTTCCGTGTTCCTGTTTCCTCCAAAG |
| | | CCTAAGGACACCCTGATGATCAGCAGAACCCCTGAAGTGACCTGCGT |
| | | GGTGGTGGATGTGTCTCACGAGGACCCAGAAGTGAAGTTCAATTGGT |
| | | ACGTGGACGGCGTGGAAGTGCACAACGCCAAGACCAAGCCTAGAGA |
| | | GGAACAGTACAACAGCACCTACAGAGTGGTGTCCGTGCTGACAGTGC |
| | | TGCACCAGGATTGGCTGAACGGCAAAGAGTACAAGTGCAAGGTGTC |
| | | CAACAAGGCCCTGCCTGCTCCTATCGAGAAAACCATCAGCAAGGCCA |
| | | AGGGCCAGCCTAGGGAACCCCAGGTTTACACCCTGCCTCCATGCCGCG |
| | | ACGAACTGACCAAGAACCAGGTGTCCCTGTGGTGCCTGGTCAAGGGCT |
| | | TCTACCCTTCCGATATCGCCGTGGAATGGGAGAGCAATGGCCAGCCTG |
| | | AGAACAACTACAAGACAACCCCTCCTGTGCTGGACAGCGACGGCTCAT |
| | | TCTTCCTGTACAGCAAGCTGACAGTGGACAAGAGCAGATGGCAGCAGG |
| | | GCAACGTGTTCAGCTGCAGCGTGCTGCATGAAGCCCTGCACAGCCACT |
| | | ACACCCAGAAGTCCCTGTCTCTGAGCCCCGGCAAGTGATAA |
| | | (SEQ ID NO: 520) |
| | CH1-Hinge-CH2 | GCCTCTACAAAGGGCCCTAGCGTGTTCCCTCTGGCTCCTAGCAGCAAGT |
| | (GAALIE)-CH3 (LS) | CGACATCTGGCGGAACAGCCGCTCTGGGCTGTCTGGTCAAGGACTACT |
| | (G1m17, 1) | TTCCCGAGCCTGTGACAGTGTCCTGGAACTCTGGCGCTCTGACAAGCG |
| | | GCGTGCACACATTTCCAGCCGTGCTGCAAAGCAGCGGCCTGTACTCTCT |
| | | GAGCAGCGTGGTCACAGTGCCAAGCTCTAGCCTGGGCACCCAGACCTA |
| | | CATCTGCAATGTGAACCACAAGCCTAGCAACACCAAGGTGGACAAGAA |
| | | GGTGGAACCCAAGAGCTGCGACAAGACCCACACCTGTCCTCCATGTCC |
| | | TGCTCCAGAACTGCTGGCCGGACCTTCCGTGTTCCTGTTTCCTCCAAAG |
| | | CCTAAGGACACCCTGATGATCAGCAGAACCCCTGAAGTGACCTGCGT |
| | | GGTGGTGGATGTGTCTCACGAGGACCCTGAAGTGAAGTTCAATTGGT |
| | | ACGTGGACGGCGTGGAAGTGCACAACGCCAAGACCAAGCCTAGAGA |
| | | GGAACAGTACAACAGCACCTACAGAGTGGTGTCCGTGCTGACCGTGC |
| | | TGCACCAGGATTGGCTGAACGGCAAAGAGTACAAGTGCAAGGTGTC |
| | | CAACAAGGCCCTGCCTCTGCCTGAGGAAAAGACCATCAGCAAGGCCA |
| | | AGGGCCAGCCTAGGGAACCCCAGGTTTACACACTGCCTCCAAGCCGCG |
| | | ACGAACTGACCAAGAACCAGGTGTCCCTGACCTGCCTCGTGAAGGGCT |
| | | TCTACCCTTCCGATATCGCCGTGGAATGGGAGAGCAATGGCCAGCCTG |
| | | AGAACAACTACAAGACAACCCCTCCTGTGCTGGACAGCGACGGCTCAT |
| | | TCTTCCTGTACAGCAAGCTGACCGTGGACAAGTCCAGATGGCAGCAGG |
| | | GCAACGTGTTCAGCTGTAGCGTGCTGCACGAAGCCCTGCACAGCCACT |
| | | ACACCCAGAAAAGCCTGTCTCTGAGCCCCGGCAAATGATAA |
| | | (SEQ ID NO: 521) |
| | CH1-Hinge-CH2 | GCCTCTACAAAGGGCCCTAGCGTGTTCCCTCTGGCTCCTAGCAGCAAGT |
| | (GAIE)-CH3 (LS) | CGACATCTGGCGGAACAGCCGCTCTGGGCTGTCTGGTCAAGGACTACT |
| | (G1m17, 1) | TTCCCGAGCCTGTGACAGTGTCCTGGAACTCTGGCGCTCTGACAAGCG |
| | | GCGTGCACACATTTCCAGCCGTGCTGCAAAGCAGCGGCCTGTACTCTCT |
| | | GAGCAGCGTGGTCACAGTGCCAAGCTCTAGCCTGGGCACCCAGACCTA |
| | | CATCTGCAATGTGAACCACAAGCCTAGCAACACCAAGGTGGACAAGAA |
| | | GGTGGAACCCAAGAGCTGCGACAAGACCCACACCTGTCCTCCATGTCC |
| | | TGCTCCAGAACTGCTGGCCGGACCTTCCGTGTTCCTGTTTCCTCCAAAG |
| | | CCTAAGGACACCCTGATGATCAGCAGAACCCCTGAAGTGACCTGCGT |
| | | GGTGGTGGATGTGTCTCACGAGGACCCTGAAGTGAAGTTCAATTGGT |
| | | ACGTGGACGGCGTGGAAGTGCACAACGCCAAGACCAAGCCTAGAGA |
| | | GGAACAGTACAACAGCACCTACAGAGTGGTGTCCGTGCTGACCGTGC |
| | | TGCACCAGGATTGGCTGAACGGCAAAGAGTACAAGTGCAAGGTGTC |
| | | CAACAAGGCCCTGCCTGCCCCTGAGGAAAAGACCATCAGCAAGGCCA |
| | | AGGGCCAGCCTAGGGAACCCCAGGTTTACACACTGCCTCCAAGCCGCG |
| | | ACGAACTGACCAAGAACCAGGTGTCCCTGACCTGCCTCGTGAAGGGCT |
| | | TCTACCCTTCCGATATCGCCGTGGAATGGGAGAGCAATGGCCAGCCTG |
| | | AGAACAACTACAAGACAACCCCTCCTGTGCTGGACAGCGACGGCTCAT |
| | | TCTTCCTGTACAGCAAGCTGACCGTGGACAAGTCCAGATGGCAGCAGG |
| | | GCAACGTGTTCAGCTGTAGCGTGCTGCACGAAGCCCTGCACAGCCACT |
| | | ACACCCAGAAAAGCCTGTCTCTGAGCCCCGGCAAATGATAA |
| | | (SEQ ID NO: 522) |
| | CH1-Hinge-CH2(GA)- | GCCTCTACAAAGGGCCCTAGCGTGTTCCCTCTGGCTCCTAGCAGCAAGT |
| | CH3 (LS) (G1m3) | CGACATCTGGCGGAACAGCCGCTCTGGGCTGTCTGGTCAAGGACTACTT |
| | | TCCCGAGCCTGTGACAGTGTCCTGGAACTCTGGCGCTCTGACAAGCGGC |
| | | GTGCACACATTTCCAGCCGTGCTGCAAAGCAGCGGCCTGTACTCTCTGA |
| | | GCAGCGTGGTCACAGTGCCAAGCTCTAGCCTGGGCACCCAGACCTACAT |
| | | CTGCAATGTGAACCACAAGCCTAGCAACACCAAGGTGGACAAGAGAGT |
| | | GGAACCCAAGAGCTGCGACAAGACCCACACCTGTCCTCCATGTCCTGCT |
| | | CCAGAACTGCTGGCCGGACCTTCCGTGTTCCTGTTTCCTCCAAAGCCTA |
| | | AGGACACCCTGATGATCAGCAGAACCCCTGAAGTGACCTGCGTGGTGG |
| | | TGGATGTGTCTCACGAGGACCCTGAAGTGAAGTTCAATTGGTACGTGG |
| | | ACGGCGTGGAAGTGCACAACGCCAAGACCAAGCCTAGAGAGGAACA |
| | | GTACAACAGCACCTACAGAGTGGTGTCCGTGCTGACCGTGCTGCACCA |
| | | GGATTGGCTGAACGGCAAAGAGTACAAGTGCAAGGTGTCCAACAAGG |
| | | CCCTGCCTGCCCCTATCGAAAAGACCATCAGCAAGGCCAAGGGCCAGC |
| | | CTAGGGAACCCCAGGTTTACACACTGCCTCCAAGCCGCGAGGAAATGAC |
| | | CAAGAACCAGGTGTCCCTGACCTGCCTCGTGAAGGGCTTCTACCCTTCCG |
| | | ATATCGCCGTGGAATGGGAGAGCAATGGCCAGCCTGAGAACAACTACAA |
| | | GACAACCCCTCCTGTGCTGGACAGCGACGGCTCATTCTTCCTGTACAGCA |
| | | AGCTGACCGTGGACAAGTCCAGATGGCAGCAGGGCAACGTGTTCAGCT |
| | | GTAGCGTGCTGCACGAAGCCCTGCACAGCCACTACACCCAGAAAAGCCT |
| | | GTCTCTGAGCCCCGGCAAATGATAA |
| | | (SEQ ID NO: 523) |
| | CH1-Hinge-CH2(IE)- | GCCTCTACAAAGGGCCCTAGCGTGTTCCCTCTGGCTCCTAGCAGCAAGT |
| | CH3 (LS) (G1m3) | CGACATCTGGCGGAACAGCCGCTCTGGGCTGTCTGGTCAAGGACTACT |
| | | TTCCCGAGCCTGTGACAGTGTCCTGGAACTCTGGCGCTCTGACAAGCG |
| | | GCGTGCACACATTTCCAGCCGTGCTGCAAAGCAGCGGCCTGTACTCTCT |
| | | GAGCAGCGTGGTCACAGTGCCAAGCTCTAGCCTGGGCACCCAGACCTA |
| | | CATCTGCAATGTGAACCACAAGCCTAGCAACACCAAGGTGGACAAGAG |
| | | AGTGGAACCCAAGAGCTGCGACAAGACCCACACCTGTCCTCCATGTCC |
| | | TGCTCCAGAACTGCTGGGCGGACCTTCCGTGTTCCTGTTTCCTCCAAA |
| | | GCCTAAGGACACCCTGATGATCAGCAGAACCCCTGAAGTGACCTGCG |
| | | TGGTGGTGGATGTGTCTCACGAGGACCCTGAAGTGAAGTTCAATTGG |
| | | TACGTGGACGGCGTGGAAGTGCACAACGCCAAGACCAAGCCTAGAG |
| | | AGGAACAGTACAACAGCACCTACAGAGTGGTGTCCGTGCTGACCGTG |
| | | CTGCACCAGGATTGGCTGAACGGCAAAGAGTACAAGTGCAAGGTGT |
| | | CCAACAAGGCCCTGCCTGCCCCTGAGGAAAAGACCATCAGCAAGGCC |
| | | AAGGGCCAGCCTAGGGAACCCCAGGTTTACACACTGCCTCCAAGCCGC |
| | | GAGGAAATGACCAAGAACCAGGTGTCCCTGACCTGCCTCGTGAAGGGC |
| | | TTCTACCCTTCCGATATCGCCGTGGAATGGGAGAGCAATGGCCAGCCT |
| | | GAGAACAACTACAAGACAACCCCTCCTGTGCTGGACAGCGACGGCTCA |
| | | TTCTTCCTGTACAGCAAGCTGACCGTGGACAAGTCCAGATGGCAGCAG |
| | | GGCAACGTGTTCAGCTGTAGCGTGCTGCACGAAGCCCTGCACAGCCAC |
| | | TACACCCAGAAAAGCCTGTCTCTGAGCCCCGGCAAATGATAA |
| | | (SEQ ID NO: 524) |
| | CH1-Hinge-CH2-CH3 | GCCTCTACAAAGGGCCCTAGCGTGTTCCCTCTGGCTCCTAGCAGCAAGT |
| | (cah-LS) (G1m3) | CGACATCTGGCGGAACAGCCGCTCTGGGCTGTCTGGTCAAGGACTACT |
| | | TTCCCGAGCCTGTGACAGTGTCCTGGAACTCTGGCGCTCTGACAAGCG |
| | | GCGTGCACACATTTCCAGCCGTGCTGCAAAGCAGCGGCCTGTACTCTCT |
| | | GAGCAGCGTGGTCACAGTGCCAAGCTCTAGCCTGGGCACCCAGACCTA |
| | | CATCTGCAATGTGAACCACAAGCCTAGCAACACCAAGGTGGACAAGAG |
| | | AGTGGAACCCAAGAGCTGCGACAAGACCCACACCTGTCCTCCATGTCC |
| | | TGCTCCAGAACTGCTCGGCGGACCTTCCGTGTTCCTGTTTCCTCCAAAG |
| | | CCTAAGGACACCCTGATGATCAGCAGAACCCCTGAAGTGACCTGCGT |
| | | GGTGGTGGATGTGTCTCACGAGGACCCAGAAGTGAAGTTCAATTGGT |
| | | ACGTGGACGGCGTGGAAGTGCACAACGCCAAGACCAAGCCTAGAGA |
| | | GGAACAGTACAACAGCACCTACAGAGTGGTGTCCGTGCTGACAGTGC |
| | | TGCACCAGGATTGGCTGAACGGCAAAGAGTACAAGTGCAAGGTGTC |
| | | CAACAAGGCCCTGCCTGCTCCTATCGAGAAAACCATCAGCAAGGCCA |
| | | AGGGCCAGCCTCGCGAACCTCAAGTCTGTACACTGCCTCCTAGCCGCGA |
| | | GGAAATGACCAAGAACCAGGTGTCCCTGAGCTGCGCCGTGAAGGGCTT |
| | | TTACCCTTCCGATATCGCCGTGGAATGGGAGAGCAATGGCCAGCCTGA |
| | | GAACAACTACAAGACAACCCCTCCTGTGCTGGACAGCGACGGCTCATTC |
| | | TTCCTGGTGTCCAAGCTGACAGTGGACAAGAGCAGATGGCAGCAGGG |
| | | CAACGTGTTCAGCTGCAGCGTGCTGCATGAAGCCCTGCACAGCCACTAC |
| | | ACCCAGAAGTCCCTGTCTCTGAGCCCCGGCAAGTGATAA |
| | | (SEQ ID NO: 525) |
| | CH1-Hinge-CH2 | GCCTCTACAAAGGGCCCTAGCGTGTTCCCTCTGGCTCCTAGCAGCAAGT |
| | (GAALIE)-CH3 | CGACATCTGGCGGAACAGCCGCTCTGGGCTGTCTGGTCAAGGACTACT |
| | (cah-LS) (G1m3) | TTCCCGAGCCTGTGACAGTGTCCTGGAACTCTGGCGCTCTGACAAGCG |
| | | GCGTGCACACATTTCCAGCCGTGCTGCAAAGCAGCGGCCTGTACTCTCT |
| | | GAGCAGCGTGGTCACAGTGCCAAGCTCTAGCCTGGGCACCCAGACCTA |
| | | CATCTGCAATGTGAACCACAAGCCTAGCAACACCAAGGTGGACAAGAG |
| | | AGTGGAACCCAAGAGCTGCGACAAGACCCACACCTGTCCTCCATGTCC |
| | | TGCTCCAGAACTGCTGGCCGGACCTTCCGTGTTCCTGTTTCCTCCAAAG |
| | | CCTAAGGACACCCTGATGATCAGCAGAACCCCTGAAGTGACCTGCGT |
| | | GGTGGTGGATGTGTCTCACGAGGACCCTGAAGTGAAGTTCAATTGGT |
| | | ACGTGGACGGCGTGGAAGTGCACAACGCCAAGACCAAGCCTAGAGA |
| | | GGAACAGTACAACAGCACCTACAGAGTGGTGTCCGTGCTGACCGTGC |
| | | TGCACCAGGATTGGCTGAACGGCAAAGAGTACAAGTGCAAGGTGTC |
| | | CAACAAGGCCCTGCCTCTGCCTGAGGAAAAGACCATCAGCAAGGCCA |
| | | AGGGCCAGCCTCGCGAACCTCAAGTCTGTACACTGCCTCCTAGCCGCGA |
| | | GGAAATGACCAAGAACCAGGTGTCCCTGAGCTGCGCCGTGAAGGGCTT |
| | | TTACCCTTCCGATATCGCCGTGGAATGGGAGAGCAATGGCCAGCCTGA |
| | | GAACAACTACAAGACAACCCCTCCTGTGCTGGACAGCGACGGCTCATTC |
| | | TTCCTGGTGTCCAAGCTGACAGTGGACAAGAGCAGATGGCAGCAGGG |
| | | CAACGTGTTCAGCTGCAGCGTGCTGCATGAAGCCCTGCACAGCCACTAC |
| | | ACCCAGAAGTCCCTGTCTCTGAGCCCCGGCAAGTGATAA |
| | | (SEQ ID NO: 526) |
| | CH1-Hinge-CH2 | GCCTCTACAAAGGGCCCTAGCGTGTTCCCTCTGGCTCCTAGCAGCAAGT |
| | (GAIE)-CH3 (cah- | CGACATCTGGCGGAACAGCCGCTCTGGGCTGTCTGGTCAAGGACTACT |
| | LS) (G1m3) | TTCCCGAGCCTGTGACAGTGTCCTGGAACTCTGGCGCTCTGACAAGCG |
| | | GCGTGCACACATTTCCAGCCGTGCTGCAAAGCAGCGGCCTGTACTCTCT |
| | | GAGCAGCGTGGTCACAGTGCCAAGCTCTAGCCTGGGCACCCAGACCTA |
| | | CATCTGCAATGTGAACCACAAGCCTAGCAACACCAAGGTGGACAAGAG |
| | | AGTGGAACCCAAGAGCTGCGACAAGACCCACACCTGTCCTCCATGTCC |
| | | TGCTCCAGAACTGCTGGCCGGACCTTCCGTGTTCCTGTTTCCTCCAAAG |
| | | CCTAAGGACACCCTGATGATCAGCAGAACCCCTGAAGTGACCTGCGT |
| | | GGTGGTGGATGTGTCTCACGAGGACCCTGAAGTGAAGTTCAATTGGT |
| | | ACGTGGACGGCGTGGAAGTGCACAACGCCAAGACCAAGCCTAGAGA |
| | | GGAACAGTACAACAGCACCTACAGAGTGGTGTCCGTGCTGACCGTGC |
| | | TGCACCAGGATTGGCTGAACGGCAAAGAGTACAAGTGCAAGGTGTC |
| | | CAACAAGGCCCTGCCTGCCCCTGAGGAAAAGACCATCAGCAAGGCCA |
| | | AGGGCCAGCCTCGCGAACCTCAAGTCTGTACACTGCCTCCTAGCCGCGA |
| | | GGAAATGACCAAGAACCAGGTGTCCCTGAGCTGCGCCGTGAAGGGCTT |
| | | TTACCCTTCCGATATCGCCGTGGAATGGGAGAGCAATGGCCAGCCTGA |
| | | GAACAACTACAAGACAACCCCTCCTGTGCTGGACAGCGACGGCTCATTC |
| | | TTCCTGGTGTCCAAGCTGACAGTGGACAAGAGCAGATGGCAGCAGGG |
| | | CAACGTGTTCAGCTGCAGCGTGCTGCATGAAGCCCTGCACAGCCACTAC |
| | | ACCCAGAAGTCCCTGTCTCTGAGCCCCGGCAAGTGATAA |
| | | (SEQ ID NO: 527) |
| | CH1-Hinge-CH2 | GCCTCTACAAAGGGCCCTAGCGTGTTCCCTCTGGCTCCTAGCAGCAAGT |
| | (GAALIE)-CH3 | CGACATCTGGCGGAACAGCCGCTCTGGGCTGTCTGGTCAAGGACTACT |
| | (cak-LS) (G1m3) | TTCCCGAGCCTGTGACAGTGTCCTGGAACTCTGGCGCTCTGACAAGCG |
| | | GCGTGCACACATTTCCAGCCGTGCTGCAAAGCAGCGGCCTGTACTCTCT |
| | | GAGCAGCGTGGTCACAGTGCCAAGCTCTAGCCTGGGCACCCAGACCTA |
| | | CATCTGCAATGTGAACCACAAGCCTAGCAACACCAAGGTGGACAAGAG |
| | | AGTGGAACCCAAGAGCTGCGACAAGACCCACACCTGTCCTCCATGTCC |
| | | TGCTCCAGAACTGCTGGCCGGACCTTCCGTGTTCCTGTTTCCTCCAAAG |
| | | CCTAAGGACACCCTGATGATCAGCAGAACCCCTGAAGTGACCTGCGT |
| | | GGTGGTGGATGTGTCTCACGAGGACCCTGAAGTGAAGTTCAATTGGT |
| | | ACGTGGACGGCGTGGAAGTGCACAACGCCAAGACCAAGCCTAGAGA |
| | | GGAACAGTACAACAGCACCTACAGAGTGGTGTCCGTGCTGACCGTGC |
| | | TGCACCAGGATTGGCTGAACGGCAAAGAGTACAAGTGCAAGGTGTC |
| | | CAACAAGGCCCTGCCTCTGCCTGAGGAAAAGACCATCAGCAAGGCCA |
| | | AGGGCCAGCCTAGGGAACCCCAGGTTTACACCCTGCCTCCATGCCGCG |
| | | AGGAAATGACCAAGAACCAGGTGTCCCTGTGGTGCCTGGTCAAGGGCT |
| | | TCTACCCTTCCGATATCGCCGTGGAATGGGAGAGCAATGGCCAGCCTG |
| | | AGAACAACTACAAGACAACCCCTCCTGTGCTGGACAGCGACGGCTCAT |
| | | TCTTCCTGTACAGCAAGCTGACAGTGGACAAGAGCAGATGGCAGCAGG |
| | | GCAACGTGTTCAGCTGCAGCGTGCTGCATGAAGCCCTGCACAGCCACT |
| | | ACACCCAGAAGTCCCTGTCTCTGAGCCCCGGCAAGTGATAA |
| | | (SEQ ID NO: 528) |
| | CH1-Hinge-CH2 | GCCTCTACAAAGGGCCCTAGCGTGTTCCCTCTGGCTCCTAGCAGCAAGT |
| | (GAIE)-CH3 (cak- | CGACATCTGGCGGAACAGCCGCTCTGGGCTGTCTGGTCAAGGACTACT |
| | LS) (G1m3) | TTCCCGAGCCTGTGACAGTGTCCTGGAACTCTGGCGCTCTGACAAGCG |
| | | GCGTGCACACATTTCCAGCCGTGCTGCAAAGCAGCGGCCTGTACTCTCT |
| | | GAGCAGCGTGGTCACAGTGCCAAGCTCTAGCCTGGGCACCCAGACCTA |
| | | CATCTGCAATGTGAACCACAAGCCTAGCAACACCAAGGTGGACAAGAG |
| | | AGTGGAACCCAAGAGCTGCGACAAGACCCACACCTGTCCTCCATGTCC |
| | | TGCTCCAGAACTGCTGGCCGGACCTTCCGTGTTCCTGTTTCCTCCAAAG |
| | | CCTAAGGACACCCTGATGATCAGCAGAACCCCTGAAGTGACCTGCGT |
| | | GGTGGTGGATGTGTCTCACGAGGACCCTGAAGTGAAGTTCAATTGGT |
| | | ACGTGGACGGCGTGGAAGTGCACAACGCCAAGACCAAGCCTAGAGA |
| | | GGAACAGTACAACAGCACCTACAGAGTGGTGTCCGTGCTGACCGTGC |
| | | TGCACCAGGATTGGCTGAACGGCAAAGAGTACAAGTGCAAGGTGTC |
| | | CAACAAGGCCCTGCCTGCCCCTGAGGAAAAGACCATCAGCAAGGCCA |
| | | AGGGCCAGCCTAGGGAACCCCAGGTTTACACCCTGCCTCCATGCCGCG |
| | | AGGAAATGACCAAGAACCAGGTGTCCCTGTGGTGCCTGGTCAAGGGCT |
| | | TCTACCCTTCCGATATCGCCGTGGAATGGGAGAGCAATGGCCAGCCTG |
| | | AGAACAACTACAAGACAACCCCTCCTGTGCTGGACAGCGACGGCTCAT |
| | | TCTTCCTGTACAGCAAGCTGACAGTGGACAAGAGCAGATGGCAGCAGG |
| | | GCAACGTGTTCAGCTGCAGCGTGCTGCATGAAGCCCTGCACAGCCACT |
| | | ACACCCAGAAGTCCCTGTCTCTGAGCCCCGGCAAGTGATAA |
| | | (SEQ ID NO: 529) |
| | CH1-Hinge-CH2(GA)- | GCCTCTACAAAGGGCCCTAGCGTGTTCCCTCTGGCTCCTAGCAGCAAGT |
| | CH3 (LS) (G1m17) | CGACATCTGGCGGAACAGCCGCTCTGGGCTGTCTGGTCAAGGACTACT |
| | | TTCCCGAGCCTGTGACAGTGTCCTGGAACTCTGGCGCTCTGACAAGCG |
| | | GCGTGCACACATTTCCAGCCGTGCTGCAAAGCAGCGGCCTGTACTCTCT |
| | | GAGCAGCGTGGTCACAGTGCCAAGCTCTAGCCTGGGCACCCAGACCTA |
| | | CATCTGCAATGTGAACCACAAGCCTAGCAACACCAAGGTGGACAAGAA |
| | | GGTGGAACCCAAGAGCTGCGACAAGACCCACACCTGTCCTCCATGTCC |
| | | TGCTCCAGAACTGCTGGCCGGACCTTCCGTGTTCCTGTTTCCTCCAAAG |
| | | CCTAAGGACACCCTGATGATCAGCAGAACCCCTGAAGTGACCTGCGT |
| | | GGTGGTGGATGTGTCTCACGAGGACCCTGAAGTGAAGTTCAATTGGT |
| | | ACGTGGACGGCGTGGAAGTGCACAACGCCAAGACCAAGCCTAGAGA |
| | | GGAACAGTACAACAGCACCTACAGAGTGGTGTCCGTGCTGACCGTGC |
| | | TGCACCAGGATTGGCTGAACGGCAAAGAGTACAAGTGCAAGGTGTC |
| | | CAACAAGGCCCTGCCTGCCCCTATCGAAAAGACCATCAGCAAGGCCA |
| | | AGGGCCAGCCTAGGGAACCCCAGGTTTACACACTGCCTCCAAGCCGCG |
| | | AGGAAATGACCAAGAACCAGGTGTCCCTGACCTGCCTCGTGAAGGGCT |
| | | TCTACCCTTCCGATATCGCCGTGGAATGGGAGAGCAATGGCCAGCCTG |
| | | AGAACAACTACAAGACAACCCCTCCTGTGCTGGACAGCGACGGCTCAT |
| | | TCTTCCTGTACAGCAAGCTGACCGTGGACAAGTCCAGATGGCAGCAGG |
| | | GCAACGTGTTCAGCTGTAGCGTGCTGCACGAAGCCCTGCACAGCCACT |
| | | ACACCCAGAAAAGCCTGTCTCTGAGCCCCGGCAAATGATAA |
| | | (SEQ ID NO: 530) |
| | CH1-Hinge-CH2(IE)- | GCCTCTACAAAGGGCCCTAGCGTGTTCCCTCTGGCTCCTAGCAGCAAGT |
| | CH3 (LS) (G1m17) | CGACATCTGGCGGAACAGCCGCTCTGGGCTGTCTGGTCAAGGACTACT |
| | | TTCCCGAGCCTGTGACAGTGTCCTGGAACTCTGGCGCTCTGACAAGCG |
| | | GCGTGCACACATTTCCAGCCGTGCTGCAAAGCAGCGGCCTGTACTCTCT |
| | | GAGCAGCGTGGTCACAGTGCCAAGCTCTAGCCTGGGCACCCAGACCTA |
| | | CATCTGCAATGTGAACCACAAGCCTAGCAACACCAAGGTGGACAAGAA |
| | | GGTGGAACCCAAGAGCTGCGACAAGACCCACACCTGTCCTCCATGTCC |
| | | TGCTCCAGAACTGCTGGGCGGACCTTCCGTGTTCCTGTTTCCTCCAAA |
| | | GCCTAAGGACACCCTGATGATCAGCAGAACCCCTGAAGTGACCTGCG |
| | | TGGTGGTGGATGTGTCTCACGAGGACCCTGAAGTGAAGTTCAATTGG |
| | | TACGTGGACGGCGTGGAAGTGCACAACGCCAAGACCAAGCCTAGAG |
| | | AGGAACAGTACAACAGCACCTACAGAGTGGTGTCCGTGCTGACCGTG |
| | | CTGCACCAGGATTGGCTGAACGGCAAAGAGTACAAGTGCAAGGTGT |
| | | CCAACAAGGCCCTGCCTGCCCCTGAGGAAAAGACCATCAGCAAGGCC |
| | | AAGGGCCAGCCTAGGGAACCCCAGGTTTACACACTGCCTCCAAGCCGC |
| | | GAGGAAATGACCAAGAACCAGGTGTCCCTGACCTGCCTCGTGAAGGGC |
| | | TTCTACCCTTCCGATATCGCCGTGGAATGGGAGAGCAATGGCCAGCCT |
| | | GAGAACAACTACAAGACAACCCCTCCTGTGCTGGACAGCGACGGCTCA |
| | | TTCTTCCTGTACAGCAAGCTGACCGTGGACAAGTCCAGATGGCAGCAG |
| | | GGCAACGTGTTCAGCTGTAGCGTGCTGCACGAAGCCCTGCACAGCCAC |
| | | TACACCCAGAAAAGCCTGTCTCTGAGCCCCGGCAAATGATAA |
| | | (SEQ ID NO: 531) |
| | CH1-Hinge-CH2-CH3 | GCCTCTACAAAGGGCCCTAGCGTGTTCCCTCTGGCTCCTAGCAGCAAGT |
| | (cah-LS) (G1m17) | CGACATCTGGCGGAACAGCCGCTCTGGGCTGTCTGGTCAAGGACTACT |
| | | TTCCCGAGCCTGTGACAGTGTCCTGGAACTCTGGCGCTCTGACAAGCG |
| | | GCGTGCACACATTTCCAGCCGTGCTGCAAAGCAGCGGCCTGTACTCTCT |
| | | GAGCAGCGTGGTCACAGTGCCAAGCTCTAGCCTGGGCACCCAGACCTA |
| | | CATCTGCAATGTGAACCACAAGCCTAGCAACACCAAGGTGGACAAGAA |
| | | GGTGGAACCCAAGAGCTGCGACAAGACCCACACCTGTCCTCCATGTCC |
| | | TGCTCCAGAACTGCTCGGCGGACCTTCCGTGTTCCTGTTTCCTCCAAAG |
| | | CCTAAGGACACCCTGATGATCAGCAGAACCCCTGAAGTGACCTGCGT |
| | | GGTGGTGGATGTGTCTCACGAGGACCCAGAAGTGAAGTTCAATTGGT |
| | | ACGTGGACGGCGTGGAAGTGCACAACGCCAAGACCAAGCCTAGAGA |
| | | GGAACAGTACAACAGCACCTACAGAGTGGTGTCCGTGCTGACAGTGC |
| | | TGCACCAGGATTGGCTGAACGGCAAAGAGTACAAGTGCAAGGTGTC |
| | | CAACAAGGCCCTGCCTGCTCCTATCGAGAAAACCATCAGCAAGGCCA |
| | | AGGGCCAGCCTCGCGAACCTCAAGTCTGTACACTGCCTCCTAGCCGCGA |
| | | GGAAATGACCAAGAACCAGGTGTCCCTGAGCTGCGCCGTGAAGGGCTT |
| | | TTACCCTTCCGATATCGCCGTGGAATGGGAGAGCAATGGCCAGCCTGA |
| | | GAACAACTACAAGACAACCCCTCCTGTGCTGGACAGCGACGGCTCATTC |
| | | TTCCTGGTGTCCAAGCTGACAGTGGACAAGAGCAGATGGCAGCAGGG |
| | | CAACGTGTTCAGCTGCAGCGTGCTGCATGAAGCCCTGCACAGCCACTAC |
| | | ACCCAGAAGTCCCTGTCTCTGAGCCCCGGCAAGTGATAA |
| | | (SEQ ID NO: 532) |
| | CH1-Hinge-CH2 | GCCTCTACAAAGGGCCCTAGCGTGTTCCCTCTGGCTCCTAGCAGCAAGT |
| | (GAALIE)-CH3 | CGACATCTGGCGGAACAGCCGCTCTGGGCTGTCTGGTCAAGGACTACT |
| | (cah-LS) (G1m17) | TTCCCGAGCCTGTGACAGTGTCCTGGAACTCTGGCGCTCTGACAAGCG |
| | | GCGTGCACACATTTCCAGCCGTGCTGCAAAGCAGCGGCCTGTACTCTCT |
| | | GAGCAGCGTGGTCACAGTGCCAAGCTCTAGCCTGGGCACCCAGACCTA |
| | | CATCTGCAATGTGAACCACAAGCCTAGCAACACCAAGGTGGACAAGAA |
| | | GGTGGAACCCAAGAGCTGCGACAAGACCCACACCTGTCCTCCATGTCC |
| | | TGCTCCAGAACTGCTGGCCGGACCTTCCGTGTTCCTGTTTCCTCCAAAG |
| | | CCTAAGGACACCCTGATGATCAGCAGAACCCCTGAAGTGACCTGCGT |
| | | GGTGGTGGATGTGTCTCACGAGGACCCTGAAGTGAAGTTCAATTGGT |
| | | ACGTGGACGGCGTGGAAGTGCACAACGCCAAGACCAAGCCTAGAGA |
| | | GGAACAGTACAACAGCACCTACAGAGTGGTGTCCGTGCTGACCGTGC |
| | | TGCACCAGGATTGGCTGAACGGCAAAGAGTACAAGTGCAAGGTGTC |
| | | CAACAAGGCCCTGCCTCTGCCTGAGGAAAAGACCATCAGCAAGGCCA |
| | | AGGGCCAGCCTCGCGAACCTCAAGTCTGTACACTGCCTCCTAGCCGCGA |
| | | GGAAATGACCAAGAACCAGGTGTCCCTGAGCTGCGCCGTGAAGGGCTT |
| | | TTACCCTTCCGATATCGCCGTGGAATGGGAGAGCAATGGCCAGCCTGA |
| | | GAACAACTACAAGACAACCCCTCCTGTGCTGGACAGCGACGGCTCATTC |
| | | TTCCTGGTGTCCAAGCTGACAGTGGACAAGAGCAGATGGCAGCAGGG |
| | | CAACGTGTTCAGCTGCAGCGTGCTGCATGAAGCCCTGCACAGCCACTAC |
| | | ACCCAGAAGTCCCTGTCTCTGAGCCCCGGCAAGTGATAA |
| | | (SEQ ID NO: 533) |
| | CH1-Hinge-CH2 | GCCTCTACAAAGGGCCCTAGCGTGTTCCCTCTGGCTCCTAGCAGCAAGT |
| | (GAIE)-CH3 (cah- | CGACATCTGGCGGAACAGCCGCTCTGGGCTGTCTGGTCAAGGACTACT |
| | LS) (G1m17) | TTCCCGAGCCTGTGACAGTGTCCTGGAACTCTGGCGCTCTGACAAGCG |
| | | GCGTGCACACATTTCCAGCCGTGCTGCAAAGCAGCGGCCTGTACTCTCT |
| | | GAGCAGCGTGGTCACAGTGCCAAGCTCTAGCCTGGGCACCCAGACCTA |
| | | CATCTGCAATGTGAACCACAAGCCTAGCAACACCAAGGTGGACAAGAA |
| | | GGTGGAACCCAAGAGCTGCGACAAGACCCACACCTGTCCTCCATGTCC |
| | | TGCTCCAGAACTGCTGGCCGGACCTTCCGTGTTCCTGTTTCCTCCAAAG |
| | | CCTAAGGACACCCTGATGATCAGCAGAACCCCTGAAGTGACCTGCGT |
| | | GGTGGTGGATGTGTCTCACGAGGACCCTGAAGTGAAGTTCAATTGGT |
| | | ACGTGGACGGCGTGGAAGTGCACAACGCCAAGACCAAGCCTAGAGA |
| | | GGAACAGTACAACAGCACCTACAGAGTGGTGTCCGTGCTGACCGTGC |
| | | TGCACCAGGATTGGCTGAACGGCAAAGAGTACAAGTGCAAGGTGTC |
| | | CAACAAGGCCCTGCCTGCCCCTGAGGAAAAGACCATCAGCAAGGCCA |
| | | AGGGCCAGCCTCGCGAACCTCAAGTCTGTACACTGCCTCCTAGCCGCGA |
| | | GGAAATGACCAAGAACCAGGTGTCCCTGAGCTGCGCCGTGAAGGGCTT |
| | | TTACCCTTCCGATATCGCCGTGGAATGGGAGAGCAATGGCCAGCCTGA |
| | | GAACAACTACAAGACAACCCCTCCTGTGCTGGACAGCGACGGCTCATTC |
| | | TTCCTGGTGTCCAAGCTGACAGTGGACAAGAGCAGATGGCAGCAGGG |
| | | CAACGTGTTCAGCTGCAGCGTGCTGCATGAAGCCCTGCACAGCCACTAC |
| | | ACCCAGAAGTCCCTGTCTCTGAGCCCCGGCAAGTGATAA |
| | | (SEQ ID NO: 534) |
| | CH1-Hinge-CH2 | GCCTCTACAAAGGGCCCTAGCGTGTTCCCTCTGGCTCCTAGCAGCAAGT |
| | (GAALIE)-CH3 | CGACATCTGGCGGAACAGCCGCTCTGGGCTGTCTGGTCAAGGACTACT |
| | (cak-LS) (G1m17) | TTCCCGAGCCTGTGACAGTGTCCTGGAACTCTGGCGCTCTGACAAGCG |
| | | GCGTGCACACATTTCCAGCCGTGCTGCAAAGCAGCGGCCTGTACTCTCT |
| | | GAGCAGCGTGGTCACAGTGCCAAGCTCTAGCCTGGGCACCCAGACCTA |
| | | CATCTGCAATGTGAACCACAAGCCTAGCAACACCAAGGTGGACAAGAA |
| | | GGTGGAACCCAAGAGCTGCGACAAGACCCACACCTGTCCTCCATGTCC |
| | | TGCTCCAGAACTGCTGGCCGGACCTTCCGTGTTCCTGTTTCCTCCAAAG |
| | | CCTAAGGACACCCTGATGATCAGCAGAACCCCTGAAGTGACCTGCGT |
| | | GGTGGTGGATGTGTCTCACGAGGACCCTGAAGTGAAGTTCAATTGGT |
| | | ACGTGGACGGCGTGGAAGTGCACAACGCCAAGACCAAGCCTAGAGA |
| | | GGAACAGTACAACAGCACCTACAGAGTGGTGTCCGTGCTGACCGTGC |
| | | TGCACCAGGATTGGCTGAACGGCAAAGAGTACAAGTGCAAGGTGTC |
| | | CAACAAGGCCCTGCCTCTGCCTGAGGAAAAGACCATCAGCAAGGCCA |
| | | AGGGCCAGCCTAGGGAACCCCAGGTTTACACCCTGCCTCCATGCCGCG |
| | | AGGAAATGACCAAGAACCAGGTGTCCCTGTGGTGCCTGGTCAAGGGCT |
| | | TCTACCCTTCCGATATCGCCGTGGAATGGGAGAGCAATGGCCAGCCTG |
| | | AGAACAACTACAAGACAACCCCTCCTGTGCTGGACAGCGACGGCTCAT |
| | | TCTTCCTGTACAGCAAGCTGACAGTGGACAAGAGCAGATGGCAGCAGG |
| | | GCAACGTGTTCAGCTGCAGCGTGCTGCATGAAGCCCTGCACAGCCACT |
| | | ACACCCAGAAGTCCCTGTCTCTGAGCCCCGGCAAGTGATAA |
| | | (SEQ ID NO: 535) |
| | CH1-Hinge-CH2 | GCCTCTACAAAGGGCCCTAGCGTGTTCCCTCTGGCTCCTAGCAGCAAGT |
| | (GAIE)-CH3 (cak- | CGACATCTGGCGGAACAGCCGCTCTGGGCTGTCTGGTCAAGGACTACT |
| | LS) (G1m17) | TTCCCGAGCCTGTGACAGTGTCCTGGAACTCTGGCGCTCTGACAAGCG |
| | | GCGTGCACACATTTCCAGCCGTGCTGCAAAGCAGCGGCCTGTACTCTCT |
| | | GAGCAGCGTGGTCACAGTGCCAAGCTCTAGCCTGGGCACCCAGACCTA |
| | | CATCTGCAATGTGAACCACAAGCCTAGCAACACCAAGGTGGACAAGAA |
| | | GGTGGAACCCAAGAGCTGCGACAAGACCCACACCTGTCCTCCATGTCC |
| | | TGCTCCAGAACTGCTGGCCGGACCTTCCGTGTTCCTGTTTCCTCCAAAG |
| | | CCTAAGGACACCCTGATGATCAGCAGAACCCCTGAAGTGACCTGCGT |
| | | GGTGGTGGATGTGTCTCACGAGGACCCTGAAGTGAAGTTCAATTGGT |
| | | ACGTGGACGGCGTGGAAGTGCACAACGCCAAGACCAAGCCTAGAGA |
| | | GGAACAGTACAACAGCACCTACAGAGTGGTGTCCGTGCTGACCGTGC |
| | | TGCACCAGGATTGGCTGAACGGCAAAGAGTACAAGTGCAAGGTGTC |
| | | CAACAAGGCCCTGCCTGCCCCTGAGGAAAAGACCATCAGCAAGGCCA |
| | | AGGGCCAGCCTAGGGAACCCCAGGTTTACACCCTGCCTCCATGCCGCG |
| | | AGGAAATGACCAAGAACCAGGTGTCCCTGTGGTGCCTGGTCAAGGGCT |
| | | TCTACCCTTCCGATATCGCCGTGGAATGGGAGAGCAATGGCCAGCCTG |
| | | AGAACAACTACAAGACAACCCCTCCTGTGCTGGACAGCGACGGCTCAT |
| | | TCTTCCTGTACAGCAAGCTGACAGTGGACAAGAGCAGATGGCAGCAGG |
| | | GCAACGTGTTCAGCTGCAGCGTGCTGCATGAAGCCCTGCACAGCCACT |
| | | ACACCCAGAAGTCCCTGTCTCTGAGCCCCGGCAAGTGATAA |
| | | (SEQ ID NO: 536) |
| | CH1-Hinge-CH2(GA)- | GCCTCTACAAAGGGCCCTAGCGTGTTCCCTCTGGCTCCTAGCAGCAAGT |
| | CH3 (LS) (G1m17, 1) | CGACATCTGGCGGAACAGCCGCTCTGGGCTGTCTGGTCAAGGACTACT |
| | | TTCCCGAGCCTGTGACAGTGTCCTGGAACTCTGGCGCTCTGACAAGCG |
| | | GCGTGCACACATTTCCAGCCGTGCTGCAAAGCAGCGGCCTGTACTCTCT |
| | | GAGCAGCGTGGTCACAGTGCCAAGCTCTAGCCTGGGCACCCAGACCTA |
| | | CATCTGCAATGTGAACCACAAGCCTAGCAACACCAAGGTGGACAAGAA |
| | | GGTGGAACCCAAGAGCTGCGACAAGACCCACACCTGTCCTCCATGTCC |
| | | TGCTCCAGAACTGCTGGCCGGACCTTCCGTGTTCCTGTTTCCTCCAAAG |
| | | CCTAAGGACACCCTGATGATCAGCAGAACCCCTGAAGTGACCTGCGT |
| | | GGTGGTGGATGTGTCTCACGAGGACCCTGAAGTGAAGTTCAATTGGT |
| | | ACGTGGACGGCGTGGAAGTGCACAACGCCAAGACCAAGCCTAGAGA |
| | | GGAACAGTACAACAGCACCTACAGAGTGGTGTCCGTGCTGACCGTGC |
| | | TGCACCAGGATTGGCTGAACGGCAAAGAGTACAAGTGCAAGGTGTC |
| | | CAACAAGGCCCTGCCTGCCCCTATCGAAAAGACCATCAGCAAGGCCA |
| | | AGGGCCAGCCTAGGGAACCCCAGGTTTACACACTGCCTCCAAGCCGCG |
| | | ACGAACTGACCAAGAACCAGGTGTCCCTGACCTGCCTCGTGAAGGGCT |
| | | TCTACCCTTCCGATATCGCCGTGGAATGGGAGAGCAATGGCCAGCCTG |
| | | AGAACAACTACAAGACAACCCCTCCTGTGCTGGACAGCGACGGCTCAT |
| | | TCTTCCTGTACAGCAAGCTGACCGTGGACAAGTCCAGATGGCAGCAGG |
| | | GCAACGTGTTCAGCTGTAGCGTGCTGCACGAAGCCCTGCACAGCCACT |
| | | ACACCCAGAAAAGCCTGTCTCTGAGCCCCGGCAAATGATAA |
| | | (SEQ ID NO: 537) |
| | CH1-Hinge-CH2(IE)- | GCCTCTACAAAGGGCCCTAGCGTGTTCCCTCTGGCTCCTAGCAGCAAGT |
| | CH3 (LS) (G1m17, 1) | CGACATCTGGCGGAACAGCCGCTCTGGGCTGTCTGGTCAAGGACTACT |
| | | TTCCCGAGCCTGTGACAGTGTCCTGGAACTCTGGCGCTCTGACAAGCG |
| | | GCGTGCACACATTTCCAGCCGTGCTGCAAAGCAGCGGCCTGTACTCTCT |
| | | GAGCAGCGTGGTCACAGTGCCAAGCTCTAGCCTGGGCACCCAGACCTA |
| | | CATCTGCAATGTGAACCACAAGCCTAGCAACACCAAGGTGGACAAGAA |
| | | GGTGGAACCCAAGAGCTGCGACAAGACCCACACCTGTCCTCCATGTCC |
| | | TGCTCCAGAACTGCTGGGCGGACCTTCCGTGTTCCTGTTTCCTCCAAA |
| | | GCCTAAGGACACCCTGATGATCAGCAGAACCCCTGAAGTGACCTGCG |
| | | TGGTGGTGGATGTGTCTCACGAGGACCCTGAAGTGAAGTTCAATTGG |
| | | TACGTGGACGGCGTGGAAGTGCACAACGCCAAGACCAAGCCTAGAG |
| | | AGGAACAGTACAACAGCACCTACAGAGTGGTGTCCGTGCTGACCGTG |
| | | CTGCACCAGGATTGGCTGAACGGCAAAGAGTACAAGTGCAAGGTGT |
| | | CCAACAAGGCCCTGCCTGCCCCTGAGGAAAAGACCATCAGCAAGGCC |
| | | AAGGGCCAGCCTAGGGAACCCCAGGTTTACACACTGCCTCCAAGCCGC |
| | | GACGAACTGACCAAGAACCAGGTGTCCCTGACCTGCCTCGTGAAGGGC |
| | | TTCTACCCTTCCGATATCGCCGTGGAATGGGAGAGCAATGGCCAGCCT |
| | | GAGAACAACTACAAGACAACCCCTCCTGTGCTGGACAGCGACGGCTCA |
| | | TTCTTCCTGTACAGCAAGCTGACCGTGGACAAGTCCAGATGGCAGCAG |
| | | GGCAACGTGTTCAGCTGTAGCGTGCTGCACGAAGCCCTGCACAGCCAC |
| | | TACACCCAGAAAAGCCTGTCTCTGAGCCCCGGCAAATGATAA |
| | | (SEQ ID NO: 538) |
| | CH1-Hinge-CH2-CH3 | GCCTCTACAAAGGGCCCTAGCGTGTTCCCTCTGGCTCCTAGCAGCAAGT |
| | (cah-LS) (G1m17, 1) | CGACATCTGGCGGAACAGCCGCTCTGGGCTGTCTGGTCAAGGACTACT |
| | | TTCCCGAGCCTGTGACAGTGTCCTGGAACTCTGGCGCTCTGACAAGCG |
| | | GCGTGCACACATTTCCAGCCGTGCTGCAAAGCAGCGGCCTGTACTCTCT |
| | | GAGCAGCGTGGTCACAGTGCCAAGCTCTAGCCTGGGCACCCAGACCTA |
| | | CATCTGCAATGTGAACCACAAGCCTAGCAACACCAAGGTGGACAAGAA |
| | | GGTGGAACCCAAGAGCTGCGACAAGACCCACACCTGTCCTCCATGTCC |
| | | TGCTCCAGAACTGCTCGGCGGACCTTCCGTGTTCCTGTTTCCTCCAAAG |
| | | CCTAAGGACACCCTGATGATCAGCAGAACCCCTGAAGTGACCTGCGT |
| | | GGTGGTGGATGTGTCTCACGAGGACCCAGAAGTGAAGTTCAATTGGT |
| | | ACGTGGACGGCGTGGAAGTGCACAACGCCAAGACCAAGCCTAGAGA |
| | | GGAACAGTACAACAGCACCTACAGAGTGGTGTCCGTGCTGACAGTGC |
| | | TGCACCAGGATTGGCTGAACGGCAAAGAGTACAAGTGCAAGGTGTC |
| | | CAACAAGGCCCTGCCTGCTCCTATCGAGAAAACCATCAGCAAGGCCA |
| | | AGGGCCAGCCTCGCGAACCTCAAGTCTGTACACTGCCTCCTAGCCGCGA |
| | | CGAACTGACCAAGAACCAGGTGTCCCTGAGCTGCGCCGTGAAGGGCTT |
| | | TTACCCTTCCGATATCGCCGTGGAATGGGAGAGCAATGGCCAGCCTGA |
| | | GAACAACTACAAGACAACCCCTCCTGTGCTGGACAGCGACGGCTCATTC |
| | | TTCCTGGTGTCCAAGCTGACAGTGGACAAGAGCAGATGGCAGCAGGG |
| | | CAACGTGTTCAGCTGCAGCGTGCTGCATGAAGCCCTGCACAGCCACTAC |
| | | ACCCAGAAGTCCCTGTCTCTGAGCCCCGGCAAGTGATAA |
| | | (SEQ ID NO: 539) |
| | CH1-Hinge-CH2 | GCCTCTACAAAGGGCCCTAGCGTGTTCCCTCTGGCTCCTAGCAGCAAGT |
| | (GAALIE)-CH3 | CGACATCTGGCGGAACAGCCGCTCTGGGCTGTCTGGTCAAGGACTACT |
| | (cah-LS) (G1m17, 1) | TTCCCGAGCCTGTGACAGTGTCCTGGAACTCTGGCGCTCTGACAAGCG |
| | | GCGTGCACACATTTCCAGCCGTGCTGCAAAGCAGCGGCCTGTACTCTCT |
| | | GAGCAGCGTGGTCACAGTGCCAAGCTCTAGCCTGGGCACCCAGACCTA |
| | | CATCTGCAATGTGAACCACAAGCCTAGCAACACCAAGGTGGACAAGAA |
| | | GGTGGAACCCAAGAGCTGCGACAAGACCCACACCTGTCCTCCATGTCC |
| | | TGCTCCAGAACTGCTGGCCGGACCTTCCGTGTTCCTGTTTCCTCCAAAG |
| | | CCTAAGGACACCCTGATGATCAGCAGAACCCCTGAAGTGACCTGCGT |
| | | GGTGGTGGATGTGTCTCACGAGGACCCTGAAGTGAAGTTCAATTGGT |
| | | ACGTGGACGGCGTGGAAGTGCACAACGCCAAGACCAAGCCTAGAGA |
| | | GGAACAGTACAACAGCACCTACAGAGTGGTGTCCGTGCTGACCGTGC |
| | | TGCACCAGGATTGGCTGAACGGCAAAGAGTACAAGTGCAAGGTGTC |
| | | CAACAAGGCCCTGCCTCTGCCTGAGGAAAAGACCATCAGCAAGGCCA |
| | | AGGGCCAGCCTCGCGAACCTCAAGTCTGTACACTGCCTCCTAGCCGCGA |
| | | CGAACTGACCAAGAACCAGGTGTCCCTGAGCTGCGCCGTGAAGGGCTT |
| | | TTACCCTTCCGATATCGCCGTGGAATGGGAGAGCAATGGCCAGCCTGA |
| | | GAACAACTACAAGACAACCCCTCCTGTGCTGGACAGCGACGGCTCATTC |
| | | TTCCTGGTGTCCAAGCTGACAGTGGACAAGAGCAGATGGCAGCAGGG |
| | | CAACGTGTTCAGCTGCAGCGTGCTGCATGAAGCCCTGCACAGCCACTAC |
| | | ACCCAGAAGTCCCTGTCTCTGAGCCCCGGCAAGTGATAA |
| | | (SEQ ID NO: 540) |
| | CH1-Hinge-CH2 | GCCTCTACAAAGGGCCCTAGCGTGTTCCCTCTGGCTCCTAGCAGCAAGT |
| | (GAIE)-CH3 (cah- | CGACATCTGGCGGAACAGCCGCTCTGGGCTGTCTGGTCAAGGACTACT |
| | LS) (G1m17, 1) | TTCCCGAGCCTGTGACAGTGTCCTGGAACTCTGGCGCTCTGACAAGCG |
| | | GCGTGCACACATTTCCAGCCGTGCTGCAAAGCAGCGGCCTGTACTCTCT |
| | | GAGCAGCGTGGTCACAGTGCCAAGCTCTAGCCTGGGCACCCAGACCTA |
| | | CATCTGCAATGTGAACCACAAGCCTAGCAACACCAAGGTGGACAAGAA |
| | | GGTGGAACCCAAGAGCTGCGACAAGACCCACACCTGTCCTCCATGTCC |
| | | TGCTCCAGAACTGCTGGCCGGACCTTCCGTGTTCCTGTTTCCTCCAAAG |
| | | CCTAAGGACACCCTGATGATCAGCAGAACCCCTGAAGTGACCTGCGT |
| | | GGTGGTGGATGTGTCTCACGAGGACCCTGAAGTGAAGTTCAATTGGT |
| | | ACGTGGACGGCGTGGAAGTGCACAACGCCAAGACCAAGCCTAGAGA |
| | | GGAACAGTACAACAGCACCTACAGAGTGGTGTCCGTGCTGACCGTGC |
| | | TGCACCAGGATTGGCTGAACGGCAAAGAGTACAAGTGCAAGGTGTC |
| | | CAACAAGGCCCTGCCTGCCCCTGAGGAAAAGACCATCAGCAAGGCCA |
| | | AGGGCCAGCCTCGCGAACCTCAAGTCTGTACACTGCCTCCTAGCCGCGA |
| | | CGAACTGACCAAGAACCAGGTGTCCCTGAGCTGCGCCGTGAAGGGCTT |
| | | TTACCCTTCCGATATCGCCGTGGAATGGGAGAGCAATGGCCAGCCTGA |
| | | GAACAACTACAAGACAACCCCTCCTGTGCTGGACAGCGACGGCTCATTC |
| | | TTCCTGGTGTCCAAGCTGACAGTGGACAAGAGCAGATGGCAGCAGGG |
| | | CAACGTGTTCAGCTGCAGCGTGCTGCATGAAGCCCTGCACAGCCACTAC |
| | | ACCCAGAAGTCCCTGTCTCTGAGCCCCGGCAAGTGATAA |
| | | (SEQ ID NO: 541) |
| | CH1-Hinge-CH2 | GCCTCTACAAAGGGCCCTAGCGTGTTCCCTCTGGCTCCTAGCAGCAAGT |
| | (GAALIE)-CH3 | CGACATCTGGCGGAACAGCCGCTCTGGGCTGTCTGGTCAAGGACTACT |
| | (cak-LS) (G1m17, 1) | TTCCCGAGCCTGTGACAGTGTCCTGGAACTCTGGCGCTCTGACAAGCG |
| | | GCGTGCACACATTTCCAGCCGTGCTGCAAAGCAGCGGCCTGTACTCTCT |
| | | GAGCAGCGTGGTCACAGTGCCAAGCTCTAGCCTGGGCACCCAGACCTA |
| | | CATCTGCAATGTGAACCACAAGCCTAGCAACACCAAGGTGGACAAGAA |
| | | GGTGGAACCCAAGAGCTGCGACAAGACCCACACCTGTCCTCCATGTCC |
| | | TGCTCCAGAACTGCTGGCCGGACCTTCCGTGTTCCTGTTTCCTCCAAAG |
| | | CCTAAGGACACCCTGATGATCAGCAGAACCCCTGAAGTGACCTGCGT |
| | | GGTGGTGGATGTGTCTCACGAGGACCCTGAAGTGAAGTTCAATTGGT |
| | | ACGTGGACGGCGTGGAAGTGCACAACGCCAAGACCAAGCCTAGAGA |
| | | GGAACAGTACAACAGCACCTACAGAGTGGTGTCCGTGCTGACCGTGC |
| | | TGCACCAGGATTGGCTGAACGGCAAAGAGTACAAGTGCAAGGTGTC |
| | | CAACAAGGCCCTGCCTCTGCCTGAGGAAAAGACCATCAGCAAGGCCA |
| | | AGGGCCAGCCTAGGGAACCCCAGGTTTACACCCTGCCTCCATGCCGCG |
| | | ACGAACTGACCAAGAACCAGGTGTCCCTGTGGTGCCTGGTCAAGGGCT |
| | | TCTACCCTTCCGATATCGCCGTGGAATGGGAGAGCAATGGCCAGCCTG |
| | | AGAACAACTACAAGACAACCCCTCCTGTGCTGGACAGCGACGGCTCAT |
| | | TCTTCCTGTACAGCAAGCTGACAGTGGACAAGAGCAGATGGCAGCAGG |
| | | GCAACGTGTTCAGCTGCAGCGTGCTGCATGAAGCCCTGCACAGCCACT |
| | | ACACCCAGAAGTCCCTGTCTCTGAGCCCCGGCAAGTGATAA |
| | | (SEQ ID NO: 542) |
| | CH1-Hinge-CH2 | GCCTCTACAAAGGGCCCTAGCGTGTTCCCTCTGGCTCCTAGCAGCAAGT |
| | (GAIE)-CH3 (cak- | CGACATCTGGCGGAACAGCCGCTCTGGGCTGTCTGGTCAAGGACTACT |
| | LS) (G1m17, 1) | TTCCCGAGCCTGTGACAGTGTCCTGGAACTCTGGCGCTCTGACAAGCG |
| | | GCGTGCACACATTTCCAGCCGTGCTGCAAAGCAGCGGCCTGTACTCTCT |
| | | GAGCAGCGTGGTCACAGTGCCAAGCTCTAGCCTGGGCACCCAGACCTA |
| | | CATCTGCAATGTGAACCACAAGCCTAGCAACACCAAGGTGGACAAGAA |
| | | GGTGGAACCCAAGAGCTGCGACAAGACCCACACCTGTCCTCCATGTCC |
| | | TGCTCCAGAACTGCTGGCCGGACCTTCCGTGTTCCTGTTTCCTCCAAAG |
| | | CCTAAGGACACCCTGATGATCAGCAGAACCCCTGAAGTGACCTGCGT |
| | | GGTGGTGGATGTGTCTCACGAGGACCCTGAAGTGAAGTTCAATTGGT |
| | | ACGTGGACGGCGTGGAAGTGCACAACGCCAAGACCAAGCCTAGAGA |
| | | GGAACAGTACAACAGCACCTACAGAGTGGTGTCCGTGCTGACCGTGC |
| | | TGCACCAGGATTGGCTGAACGGCAAAGAGTACAAGTGCAAGGTGTC |
| | | CAACAAGGCCCTGCCTGCCCCTGAGGAAAAGACCATCAGCAAGGCCA |
| | | AGGGCCAGCCTAGGGAACCCCAGGTTTACACCCTGCCTCCATGCCGCG |
| | | ACGAACTGACCAAGAACCAGGTGTCCCTGTGGTGCCTGGTCAAGGGCT |
| | | TCTACCCTTCCGATATCGCCGTGGAATGGGAGAGCAATGGCCAGCCTG |
| | | AGAACAACTACAAGACAACCCCTCCTGTGCTGGACAGCGACGGCTCAT |
| | | TCTTCCTGTACAGCAAGCTGACAGTGGACAAGAGCAGATGGCAGCAGG |
| | | GCAACGTGTTCAGCTGCAGCGTGCTGCATGAAGCCCTGCACAGCCACT |
| | | ACACCCAGAAGTCCCTGTCTCTGAGCCCCGGCAAGTGATAA+L |
| | | (SEQ IDNO: 543) |

### Plasmid DNA Preparation

[1245] Plasmid DNA is prepared by selecting E. coli clones for inoculation in Luria-Bertani (LB) medium containing kanamycin. The cultures are grown overnight at 37° C. and ˜150 to 200 rpm. Following cell harvest, purification is done using the QIAGEN Plasmid Plus Maxi Kit according to the manufacturer's instructions. Finally, the concentration is determined by UV spectroscopy. DNA was stored in certified RNase- and DNase-free reaction tubes.

### Linearization and DNA Purification

[1246] Linearization of plasmid DNA is performed using appropriate restriction enzymes, followed by purification of the linearized DNA template using magnetic beads (Dynabeads™ MyOne™ Carboxylic Acid) according to the manufacturer's protocol. The DNA concentration is measured by UV spectroscopy.

### In Vitro Transcription

[1247] CleanCap 413 (m7(3′OMeG)(5′)ppp(5′)(2′OMeA)pG) capped RNA is produced following the process as disclosed, e.g., in WO 2021214204A1, which is incorporated herein by reference in its entirety. Methyl pseudo-uridine is used in the in vitro transcription reaction and incorporated into the produced RNA. Cellulose purification of the resulting RNA is performed to isolate single-stranded RNA, followed by concentration measurement by UV spectroscopy. The RNA integrity is determined by microfluidic-based electrophoresis.

### Example 10: Generation of Polyribonucleotides Encoding scFv-Fc 1-18

[1248] In this Example, polyribonucleotides encoding an 1-18 antibody agent are designed in silico as an scFv with different VH-to-VL orientations as well as interconnecting linkers having two different lengths (e.g., (G4S) 4 and (G4S) 5). The nucleotide sequences encoding the scFvs are cloned with a nucleotide sequence encoding an Fc domain to produce Fc-fusion constructs, which encode an antibody agent referred to as an “scFv-Fc” (illustrated in, e.g., FIG. 4D). The Fc-fusion constructs are cloned into the JR81 vector. scFv-Fc variants are cloned with and without an “LS” mutation. Lead candidates are further optimized by (i) introducing one of two different sequences encoding linkers (e.g., a (G4S) 4 or (G4S) 5 linker) between the scFv and Fc domain.

[1249] Objectives of the present Example include:
[1250] (1) Cloning scFv-Fc 1-18 L/S-encoding DNA into JR81 plasmid; and
[1251] (2) Verification of selected clones by control digestion and sequencing.

### Codon Optimization and Cloning Strategy

[1252] Codon optimization and cloning are performed as described above in Example 2.

[1253] Exemplary sequences used in the cloning methods above are shown in Table 21 below. Exemplary nucleotide sequences of the resulting scFv-Fc chain-encoding plasmid constructs as well as the sequence of the backbone can be found in SEQ ID NOs: 748-864.

TABLE 21
Exemplary sequences in scFv-Fc 1-18 encoding polyribonucleotides.

| Feature | Fragment | Nucleotide Sequence |
|---|---|---|
| General | Hinge (C/S)-CH2— | GAACCTAAGAGCAGCGACAAGACCCACACCTGTCCTCCATGTCCTGCTCCA |
| | CH3 (cah-LS) | GAACTGCTCGGCGGACCTTCCGTGTTCCTGTTTCCTCCAAAGCCTAAGGAC |
| | (G1m3) | ACCCTGATGATCAGCAGAACCCCTGAAGTGACCTGCGTGGTGGTGGATGT |
| | | GTCTCACGAGGACCCAGAAGTGAAGTTCAATTGGTACGTGGACGGCGTGG |
| | | AAGTGCACAACGCCAAGACCAAGCCTAGAGAGGAACAGTACAACAGCAC |
| | | CTACAGAGTGGTGTCCGTGCTGACAGTGCTGCACCAGGATTGGCTGAACG |
| | | GCAAAGAGTACAAGTGCAAGGTGTCCAACAAGGCCCTGCCTGCTCCTATC |
| | | GAGAAAACCATCAGCAAGGCCAAGGGCCAGCCTCGCGAACCTCAAGTCTG |
| | | TACACTGCCTCCTAGCCGCGAGGAAATGACCAAGAACCAGGTGTCCCTGAG |
| | | CTGCGCCGTGAAGGGCTTTTACCCTTCCGATATCGCCGTGGAATGGGAGAG |
| | | CAATGGCCAGCCTGAGAACAACTACAAGACAACCCCTCCTGTGCTGGACAG |
| | | CGACGGCTCATTCTTCCTGGTGTCCAAGCTGACAGTGGACAAGAGCAGATG |
| | | GCAGCAGGGCAACGTGTTCAGCTGCAGCGTGCTGCATGAAGCCCTGCACAG |
| | | CCACTACACCCAGAAGTCCCTGTCTCTGAGCCCCGGCAAGTGATAA |
| | | (SEQ ID NO: 544) |
| | Hinge (C/S)-CH2 | GAACCTAAGAGCAGCGACAAGACCCACACCTGTCCTCCATGTCCTGCTCCA |
| | (GAALIE)-CH3 | GAACTGCTGGCCGGACCTTCCGTGTTCCTGTTTCCTCCAAAGCCTAAGGAC |
| | (cah-LS) (G1m3) | ACCCTGATGATCAGCAGAACCCCTGAAGTGACCTGCGTGGTGGTGGATGT |
| | | GTCTCACGAGGACCCTGAAGTGAAGTTCAATTGGTACGTGGACGGCGTGG |
| | | AAGTGCACAACGCCAAGACCAAGCCTAGAGAGGAACAGTACAACAGCAC |
| | | CTACAGAGTGGTGTCCGTGCTGACCGTGCTGCACCAGGATTGGCTGAACG |
| | | GCAAAGAGTACAAGTGCAAGGTGTCCAACAAGGCCCTGCCTCTGCCTGAG |
| | | GAAAAGACCATCAGCAAGGCCAAGGGCCAGCCTCGCGAACCTCAAGTCTG |
| | | TACACTGCCTCCTAGCCGCGAGGAAATGACCAAGAACCAGGTGTCCCTGAG |
| | | CTGCGCCGTGAAGGGCTTTTACCCTTCCGATATCGCCGTGGAATGGGAGAG |
| | | CAATGGCCAGCCTGAGAACAACTACAAGACAACCCCTCCTGTGCTGGACAG |
| | | CGACGGCTCATTCTTCCTGGTGTCCAAGCTGACAGTGGACAAGAGCAGATG |
| | | GCAGCAGGGCAACGTGTTCAGCTGCAGCGTGCTGCATGAAGCCCTGCACAG |
| | | CCACTACACCCAGAAGTCCCTGTCTCTGAGCCCCGGCAAGTGATAA |
| | | (SEQ ID NO: 545) |
| | Hinge (C/S)-CH2 | GAACCTAAGAGCAGCGACAAGACCCACACCTGTCCTCCATGTCCTGCTCCA |
| | (GAIE)-CH3 (cah- | GAACTGCTGGCCGGACCTTCCGTGTTCCTGTTTCCTCCAAAGCCTAAGGAC |
| | LS) (G1m3) | ACCCTGATGATCAGCAGAACCCCTGAAGTGACCTGCGTGGTGGTGGATGT |
| | | GTCTCACGAGGACCCTGAAGTGAAGTTCAATTGGTACGTGGACGGCGTGG |
| | | AAGTGCACAACGCCAAGACCAAGCCTAGAGAGGAACAGTACAACAGCAC |
| | | CTACAGAGTGGTGTCCGTGCTGACCGTGCTGCACCAGGATTGGCTGAACG |
| | | GCAAAGAGTACAAGTGCAAGGTGTCCAACAAGGCCCTGCCTGCCCCTGAG |
| | | GAAAAGACCATCAGCAAGGCCAAGGGCCAGCCTCGCGAACCTCAAGTCTG |
| | | TACACTGCCTCCTAGCCGCGAGGAAATGACCAAGAACCAGGTGTCCCTGAG |
| | | CTGCGCCGTGAAGGGCTTTTACCCTTCCGATATCGCCGTGGAATGGGAGAG |
| | | CAATGGCCAGCCTGAGAACAACTACAAGACAACCCCTCCTGTGCTGGACAG |
| | | CGACGGCTCATTCTTCCTGGTGTCCAAGCTGACAGTGGACAAGAGCAGATG |
| | | GCAGCAGGGCAACGTGTTCAGCTGCAGCGTGCTGCATGAAGCCCTGCACAG |
| | | CCACTACACCCAGAAGTCCCTGTCTCTGAGCCCCGGCAAGTGATAA |
| | | (SEQ ID NO: 546) |
| | Hinge (C/S)-CH2— | GAACCTAAGAGCAGCGACAAGACCCACACCTGTCCTCCATGTCCTGCTCCA |
| | CH3 (cak-LS) | GAACTGCTCGGCGGACCTTCCGTGTTCCTGTTTCCTCCAAAGCCTAAGGAC |
| | (G1m3) | ACCCTGATGATCAGCAGAACCCCTGAAGTGACCTGCGTGGTGGTGGATGT |
| | | GTCTCACGAGGACCCAGAAGTGAAGTTCAATTGGTACGTGGACGGCGTGG |
| | | AAGTGCACAACGCCAAGACCAAGCCTAGAGAGGAACAGTACAACAGCAC |
| | | CTACAGAGTGGTGTCCGTGCTGACAGTGCTGCACCAGGATTGGCTGAACG |
| | | GCAAAGAGTACAAGTGCAAGGTGTCCAACAAGGCCCTGCCTGCTCCTATC |
| | | GAGAAAACCATCAGCAAGGCCAAGGGCCAGCCTAGGGAACCCCAGGTTTA |
| | | CACCCTGCCTCCATGCCGCGAGGAAATGACCAAGAACCAGGTGTCCCTGTG |
| | | GTGCCTGGTCAAGGGCTTCTACCCTTCCGATATCGCCGTGGAATGGGAGAG |
| | | CAATGGCCAGCCTGAGAACAACTACAAGACAACCCCTCCTGTGCTGGACAG |
| | | CGACGGCTCATTCTTCCTGTACAGCAAGCTGACAGTGGACAAGAGCAGATG |
| | | GCAGCAGGGCAACGTGTTCAGCTGCAGCGTGCTGCATGAAGCCCTGCACAG |
| | | CCACTACACCCAGAAGTCCCTGTCTCTGAGCCCCGGCAAGTGATAA |
| | | (SEQ ID NO: 547) |
| | Hinge (C/S)-CH2 | GAACCTAAGAGCAGCGACAAGACCCACACCTGTCCTCCATGTCCTGCTCCA |
| | (GAALIE)-CH3 | GAACTGCTGGCCGGACCTTCCGTGTTCCTGTTTCCTCCAAAGCCTAAGGAC |
| | (cak-LS) (G1m3) | ACCCTGATGATCAGCAGAACCCCTGAAGTGACCTGCGTGGTGGTGGATGT |
| | | GTCTCACGAGGACCCTGAAGTGAAGTTCAATTGGTACGTGGACGGCGTGG |
| | | AAGTGCACAACGCCAAGACCAAGCCTAGAGAGGAACAGTACAACAGCAC |
| | | CTACAGAGTGGTGTCCGTGCTGACCGTGCTGCACCAGGATTGGCTGAACG |
| | | GCAAAGAGTACAAGTGCAAGGTGTCCAACAAGGCCCTGCCTCTGCCTGAG |
| | | GAAAAGACCATCAGCAAGGCCAAGGGCCAGCCTAGGGAACCCCAGGTTTA |
| | | CACCCTGCCTCCATGCCGCGAGGAAATGACCAAGAACCAGGTGTCCCTGTG |
| | | GTGCCTGGTCAAGGGCTTCTACCCTTCCGATATCGCCGTGGAATGGGAGAG |
| | | CAATGGCCAGCCTGAGAACAACTACAAGACAACCCCTCCTGTGCTGGACAG |
| | | CGACGGCTCATTCTTCCTGTACAGCAAGCTGACAGTGGACAAGAGCAGATG |
| | | GCAGCAGGGCAACGTGTTCAGCTGCAGCGTGCTGCATGAAGCCCTGCACAG |
| | | CCACTACACCCAGAAGTCCCTGTCTCTGAGCCCCGGCAAGTGATAA |
| | | (SEQ ID NO: 548) |
| | Hinge (C/S)-CH2 | GAACCTAAGAGCAGCGACAAGACCCACACCTGTCCTCCATGTCCTGCTCCA |
| | (GAIE)-CH3 (cak- | GAACTGCTGGCCGGACCTTCCGTGTTCCTGTTTCCTCCAAAGCCTAAGGAC |
| | LS) (G1m3) | ACCCTGATGATCAGCAGAACCCCTGAAGTGACCTGCGTGGTGGTGGATGT |
| | | GTCTCACGAGGACCCTGAAGTGAAGTTCAATTGGTACGTGGACGGCGTGG |
| | | AAGTGCACAACGCCAAGACCAAGCCTAGAGAGGAACAGTACAACAGCAC |
| | | CTACAGAGTGGTGTCCGTGCTGACCGTGCTGCACCAGGATTGGCTGAACG |
| | | GCAAAGAGTACAAGTGCAAGGTGTCCAACAAGGCCCTGCCTGCCCCTGAG |
| | | GAAAAGACCATCAGCAAGGCCAAGGGCCAGCCTAGGGAACCCCAGGTTTA |
| | | CACCCTGCCTCCATGCCGCGAGGAAATGACCAAGAACCAGGTGTCCCTGTG |
| | | GTGCCTGGTCAAGGGCTTCTACCCTTCCGATATCGCCGTGGAATGGGAGAG |
| | | CAATGGCCAGCCTGAGAACAACTACAAGACAACCCCTCCTGTGCTGGACAG |
| | | CGACGGCTCATTCTTCCTGTACAGCAAGCTGACAGTGGACAAGAGCAGATG |
| | | GCAGCAGGGCAACGTGTTCAGCTGCAGCGTGCTGCATGAAGCCCTGCACAG |
| | | CCACTACACCCAGAAGTCCCTGTCTCTGAGCCCCGGCAAGTGATAA |
| | | (SEQ ID NO: 549) |
| | Hinge (C/S)-CH2— | GAACCTAAGAGCAGCGACAAGACCCACACCTGTCCTCCATGTCCTGCTCCA |
| | CH3 (cah-LS) | GAACTGCTCGGCGGACCTTCCGTGTTCCTGTTTCCTCCAAAGCCTAAGGAC |
| | (G1m17) | ACCCTGATGATCAGCAGAACCCCTGAAGTGACCTGCGTGGTGGTGGATGT |
| | | GTCTCACGAGGACCCAGAAGTGAAGTTCAATTGGTACGTGGACGGCGTGG |
| | | AAGTGCACAACGCCAAGACCAAGCCTAGAGAGGAACAGTACAACAGCAC |
| | | CTACAGAGTGGTGTCCGTGCTGACAGTGCTGCACCAGGATTGGCTGAACG |
| | | GCAAAGAGTACAAGTGCAAGGTGTCCAACAAGGCCCTGCCTGCTCCTATC |
| | | GAGAAAACCATCAGCAAGGCCAAGGGCCAGCCTCGCGAACCTCAAGTCTG |
| | | TACACTGCCTCCTAGCCGCGAGGAAATGACCAAGAACCAGGTGTCCCTGAG |
| | | CTGCGCCGTGAAGGGCTTTTACCCTTCCGATATCGCCGTGGAATGGGAGAG |
| | | CAATGGCCAGCCTGAGAACAACTACAAGACAACCCCTCCTGTGCTGGACAG |
| | | CGACGGCTCATTCTTCCTGGTGTCCAAGCTGACAGTGGACAAGAGCAGATG |
| | | GCAGCAGGGCAACGTGTTCAGCTGCAGCGTGCTGCATGAAGCCCTGCACAG |
| | | CCACTACACCCAGAAGTCCCTGTCTCTGAGCCCCGGCAAGTGATAA |
| | | (SEQ ID NO: 550) |
| | Hinge (C/S)-CH2 | GAACCTAAGAGCAGCGACAAGACCCACACCTGTCCTCCATGTCCTGCTCCA |
| | (GAALIE)-CH3 | GAACTGCTGGCCGGACCTTCCGTGTTCCTGTTTCCTCCAAAGCCTAAGGAC |
| | (cah-LS) (G1m17) | ACCCTGATGATCAGCAGAACCCCTGAAGTGACCTGCGTGGTGGTGGATGT |
| | | GTCTCACGAGGACCCTGAAGTGAAGTTCAATTGGTACGTGGACGGCGTGG |
| | | AAGTGCACAACGCCAAGACCAAGCCTAGAGAGGAACAGTACAACAGCAC |
| | | CTACAGAGTGGTGTCCGTGCTGACCGTGCTGCACCAGGATTGGCTGAACG |
| | | GCAAAGAGTACAAGTGCAAGGTGTCCAACAAGGCCCTGCCTCTGCCTGAG |
| | | GAAAAGACCATCAGCAAGGCCAAGGGCCAGCCTCGCGAACCTCAAGTCTG |
| | | TACACTGCCTCCTAGCCGCGAGGAAATGACCAAGAACCAGGTGTCCCTGAG |
| | | CTGCGCCGTGAAGGGCTTTTACCCTTCCGATATCGCCGTGGAATGGGAGAG |
| | | CAATGGCCAGCCTGAGAACAACTACAAGACAACCCCTCCTGTGCTGGACAG |
| | | CGACGGCTCATTCTTCCTGGTGTCCAAGCTGACAGTGGACAAGAGCAGATG |
| | | GCAGCAGGGCAACGTGTTCAGCTGCAGCGTGCTGCATGAAGCCCTGCACAG |
| | | CCACTACACCCAGAAGTCCCTGTCTCTGAGCCCCGGCAAGTGATAA |
| | | (SEQ ID NO: 551) |
| | Hinge (C/S)-CH2 | GAACCTAAGAGCAGCGACAAGACCCACACCTGTCCTCCATGTCCTGCTCCA |
| | (GAIE)-CH3 (cah- | GAACTGCTGGCCGGACCTTCCGTGTTCCTGTTTCCTCCAAAGCCTAAGGAC |
| | LS) (G1m17) | ACCCTGATGATCAGCAGAACCCCTGAAGTGACCTGCGTGGTGGTGGATGT |
| | | GTCTCACGAGGACCCTGAAGTGAAGTTCAATTGGTACGTGGACGGCGTGG |
| | | AAGTGCACAACGCCAAGACCAAGCCTAGAGAGGAACAGTACAACAGCAC |
| | | CTACAGAGTGGTGTCCGTGCTGACCGTGCTGCACCAGGATTGGCTGAACG |
| | | GCAAAGAGTACAAGTGCAAGGTGTCCAACAAGGCCCTGCCTGCCCCTGAG |
| | | GAAAAGACCATCAGCAAGGCCAAGGGCCAGCCTCGCGAACCTCAAGTCTG |
| | | TACACTGCCTCCTAGCCGCGAGGAAATGACCAAGAACCAGGTGTCCCTGAG |
| | | CTGCGCCGTGAAGGGCTTTTACCCTTCCGATATCGCCGTGGAATGGGAGAG |
| | | CAATGGCCAGCCTGAGAACAACTACAAGACAACCCCTCCTGTGCTGGACAG |
| | | CGACGGCTCATTCTTCCTGGTGTCCAAGCTGACAGTGGACAAGAGCAGATG |
| | | GCAGCAGGGCAACGTGTTCAGCTGCAGCGTGCTGCATGAAGCCCTGCACAG |
| | | CCACTACACCCAGAAGTCCCTGTCTCTGAGCCCCGGCAAGTGATAA |
| | | (SEQ ID NO: 552) |
| | Hinge (C/S)-CH2— | GAACCTAAGAGCAGCGACAAGACCCACACCTGTCCTCCATGTCCTGCTCCA |
| | CH3 (cak-LS) | GAACTGCTCGGCGGACCTTCCGTGTTCCTGTTTCCTCCAAAGCCTAAGGAC |
| | (G1m17) | ACCCTGATGATCAGCAGAACCCCTGAAGTGACCTGCGTGGTGGTGGATGT |
| | | GTCTCACGAGGACCCAGAAGTGAAGTTCAATTGGTACGTGGACGGCGTGG |
| | | AAGTGCACAACGCCAAGACCAAGCCTAGAGAGGAACAGTACAACAGCAC |
| | | CTACAGAGTGGTGTCCGTGCTGACAGTGCTGCACCAGGATTGGCTGAACG |
| | | GCAAAGAGTACAAGTGCAAGGTGTCCAACAAGGCCCTGCCTGCTCCTATC |
| | | GAGAAAACCATCAGCAAGGCCAAGGGCCAGCCTAGGGAACCCCAGGTTTA |
| | | CACCCTGCCTCCATGCCGCGAGGAAATGACCAAGAACCAGGTGTCCCTGTG |
| | | GTGCCTGGTCAAGGGCTTCTACCCTTCCGATATCGCCGTGGAATGGGAGAG |
| | | CAATGGCCAGCCTGAGAACAACTACAAGACAACCCCTCCTGTGCTGGACAG |
| | | CGACGGCTCATTCTTCCTGTACAGCAAGCTGACAGTGGACAAGAGCAGATG |
| | | GCAGCAGGGCAACGTGTTCAGCTGCAGCGTGCTGCATGAAGCCCTGCACAG |
| | | CCACTACACCCAGAAGTCCCTGTCTCTGAGCCCCGGCAAGTGATAA |
| | | (SEQ ID NO: 553) |
| | Hinge (C/S)-CH2 | GAACCTAAGAGCAGCGACAAGACCCACACCTGTCCTCCATGTCCTGCTCCA |
| | (GAALIE)-CH3 | GAACTGCTGGCCGGACCTTCCGTGTTCCTGTTTCCTCCAAAGCCTAAGGAC |
| | (cak-LS) (G1m17) | ACCCTGATGATCAGCAGAACCCCTGAAGTGACCTGCGTGGTGGTGGATGT |
| | | GTCTCACGAGGACCCTGAAGTGAAGTTCAATTGGTACGTGGACGGCGTGG |
| | | AAGTGCACAACGCCAAGACCAAGCCTAGAGAGGAACAGTACAACAGCAC |
| | | CTACAGAGTGGTGTCCGTGCTGACCGTGCTGCACCAGGATTGGCTGAACG |
| | | GCAAAGAGTACAAGTGCAAGGTGTCCAACAAGGCCCTGCCTCTGCCTGAG |
| | | GAAAAGACCATCAGCAAGGCCAAGGGCCAGCCTAGGGAACCCCAGGTTTA |
| | | CACCCTGCCTCCATGCCGCGAGGAAATGACCAAGAACCAGGTGTCCCTGTG |
| | | GTGCCTGGTCAAGGGCTTCTACCCTTCCGATATCGCCGTGGAATGGGAGAG |
| | | CAATGGCCAGCCTGAGAACAACTACAAGACAACCCCTCCTGTGCTGGACAG |
| | | CGACGGCTCATTCTTCCTGTACAGCAAGCTGACAGTGGACAAGAGCAGATG |
| | | GCAGCAGGGCAACGTGTTCAGCTGCAGCGTGCTGCATGAAGCCCTGCACAG |
| | | CCACTACACCCAGAAGTCCCTGTCTCTGAGCCCCGGCAAGTGATAA |
| | | (SEQ ID NO: 554) |
| | Hinge (C/S)-CH2 | GAACCTAAGAGCAGCGACAAGACCCACACCTGTCCTCCATGTCCTGCTCCA |
| | (GAIE)-CH3 (cak- | GAACTGCTGGCCGGACCTTCCGTGTTCCTGTTTCCTCCAAAGCCTAAGGAC |
| | LS) (G1m17) | ACCCTGATGATCAGCAGAACCCCTGAAGTGACCTGCGTGGTGGTGGATGT |
| | | GTCTCACGAGGACCCTGAAGTGAAGTTCAATTGGTACGTGGACGGCGTGG |
| | | AAGTGCACAACGCCAAGACCAAGCCTAGAGAGGAACAGTACAACAGCAC |
| | | CTACAGAGTGGTGTCCGTGCTGACCGTGCTGCACCAGGATTGGCTGAACG |
| | | GCAAAGAGTACAAGTGCAAGGTGTCCAACAAGGCCCTGCCTGCCCCTGAG |
| | | GAAAAGACCATCAGCAAGGCCAAGGGCCAGCCTAGGGAACCCCAGGTTTA |
| | | CACCCTGCCTCCATGCCGCGAGGAAATGACCAAGAACCAGGTGTCCCTGTG |
| | | GTGCCTGGTCAAGGGCTTCTACCCTTCCGATATCGCCGTGGAATGGGAGAG |
| | | CAATGGCCAGCCTGAGAACAACTACAAGACAACCCCTCCTGTGCTGGACAG |
| | | CGACGGCTCATTCTTCCTGTACAGCAAGCTGACAGTGGACAAGAGCAGATG |
| | | GCAGCAGGGCAACGTGTTCAGCTGCAGCGTGCTGCATGAAGCCCTGCACAG |
| | | CCACTACACCCAGAAGTCCCTGTCTCTGAGCCCCGGCAAGTGATAA |
| | | (SEQ ID NO: 555) |
| | Hinge (C/S)-CH2— | GAACCTAAGAGCAGCGACAAGACCCACACCTGTCCTCCATGTCCTGCTCCA |
| | CH3 (cah-LS) | GAACTGCTCGGCGGACCTTCCGTGTTCCTGTTTCCTCCAAAGCCTAAGGAC |
| | (G1m17, 1) | ACCCTGATGATCAGCAGAACCCCTGAAGTGACCTGCGTGGTGGTGGATGT |
| | | GTCTCACGAGGACCCAGAAGTGAAGTTCAATTGGTACGTGGACGGCGTGG |
| | | AAGTGCACAACGCCAAGACCAAGCCTAGAGAGGAACAGTACAACAGCAC |
| | | CTACAGAGTGGTGTCCGTGCTGACAGTGCTGCACCAGGATTGGCTGAACG |
| | | GCAAAGAGTACAAGTGCAAGGTGTCCAACAAGGCCCTGCCTGCTCCTATC |
| | | GAGAAAACCATCAGCAAGGCCAAGGGCCAGCCTCGCGAACCTCAAGTCTG |
| | | TACACTGCCTCCTAGCCGCGACGAACTGACCAAGAACCAGGTGTCCCTGAGC |
| | | TGCGCCGTGAAGGGCTTTTACCCTTCCGATATCGCCGTGGAATGGGAGAGC |
| | | AATGGCCAGCCTGAGAACAACTACAAGACAACCCCTCCTGTGCTGGACAGC |
| | | GACGGCTCATTCTTCCTGGTGTCCAAGCTGACAGTGGACAAGAGCAGATGG |
| | | CAGCAGGGCAACGTGTTCAGCTGCAGCGTGCTGCATGAAGCCCTGCACAGC |
| | | CACTACACCCAGAAGTCCCTGTCTCTGAGCCCCGGCAAGTGATAA |
| | | (SEQ ID NO: 556) |
| | Hinge (C/S)-CH2 | GAACCTAAGAGCAGCGACAAGACCCACACCTGTCCTCCATGTCCTGCTCCA |
| | (GAALIE)-CH3 | GAACTGCTGGCCGGACCTTCCGTGTTCCTGTTTCCTCCAAAGCCTAAGGAC |
| | (cah-LS) | ACCCTGATGATCAGCAGAACCCCTGAAGTGACCTGCGTGGTGGTGGATGT |
| | (G1m17, 1) | GTCTCACGAGGACCCTGAAGTGAAGTTCAATTGGTACGTGGACGGCGTGG |
| | | AAGTGCACAACGCCAAGACCAAGCCTAGAGAGGAACAGTACAACAGCAC |
| | | CTACAGAGTGGTGTCCGTGCTGACCGTGCTGCACCAGGATTGGCTGAACG |
| | | GCAAAGAGTACAAGTGCAAGGTGTCCAACAAGGCCCTGCCTCTGCCTGAG |
| | | GAAAAGACCATCAGCAAGGCCAAGGGCCAGCCTCGCGAACCTCAAGTCTG |
| | | TACACTGCCTCCTAGCCGCGACGAACTGACCAAGAACCAGGTGTCCCTGAGC |
| | | TGCGCCGTGAAGGGCTTTTACCCTTCCGATATCGCCGTGGAATGGGAGAGC |
| | | AATGGCCAGCCTGAGAACAACTACAAGACAACCCCTCCTGTGCTGGACAGC |
| | | GACGGCTCATTCTTCCTGGTGTCCAAGCTGACAGTGGACAAGAGCAGATGG |
| | | CAGCAGGGCAACGTGTTCAGCTGCAGCGTGCTGCATGAAGCCCTGCACAGC |
| | | CACTACACCCAGAAGTCCCTGTCTCTGAGCCCCGGCAAGTGATAA |
| | | (SEQ ID NO: 557) |
| | Hinge (C/S)-CH2 | GAACCTAAGAGCAGCGACAAGACCCACACCTGTCCTCCATGTCCTGCTCCA |
| | (GAIE)-CH3 (cah- | GAACTGCTGGCCGGACCTTCCGTGTTCCTGTTTCCTCCAAAGCCTAAGGAC |
| | LS) (G1m17, 1) | ACCCTGATGATCAGCAGAACCCCTGAAGTGACCTGCGTGGTGGTGGATGT |
| | | GTCTCACGAGGACCCTGAAGTGAAGTTCAATTGGTACGTGGACGGCGTGG |
| | | AAGTGCACAACGCCAAGACCAAGCCTAGAGAGGAACAGTACAACAGCAC |
| | | CTACAGAGTGGTGTCCGTGCTGACCGTGCTGCACCAGGATTGGCTGAACG |
| | | GCAAAGAGTACAAGTGCAAGGTGTCCAACAAGGCCCTGCCTGCCCCTGAG |
| | | GAAAAGACCATCAGCAAGGCCAAGGGCCAGCCTCGCGAACCTCAAGTCTG |
| | | TACACTGCCTCCTAGCCGCGACGAACTGACCAAGAACCAGGTGTCCCTGAGC |
| | | TGCGCCGTGAAGGGCTTTTACCCTTCCGATATCGCCGTGGAATGGGAGAGC |
| | | AATGGCCAGCCTGAGAACAACTACAAGACAACCCCTCCTGTGCTGGACAGC |
| | | GACGGCTCATTCTTCCTGGTGTCCAAGCTGACAGTGGACAAGAGCAGATGG |
| | | CAGCAGGGCAACGTGTTCAGCTGCAGCGTGCTGCATGAAGCCCTGCACAGC |
| | | CACTACACCCAGAAGTCCCTGTCTCTGAGCCCCGGCAAGTGATAA |
| | | (SEQ ID NO: 558) |
| | Hinge (C/S)-CH2— | GAACCTAAGAGCAGCGACAAGACCCACACCTGTCCTCCATGTCCTGCTCCA |
| | CH3 (cak-LS) | GAACTGCTCGGCGGACCTTCCGTGTTCCTGTTTCCTCCAAAGCCTAAGGAC |
| | (G1m17, 1) | ACCCTGATGATCAGCAGAACCCCTGAAGTGACCTGCGTGGTGGTGGATGT |
| | | GTCTCACGAGGACCCAGAAGTGAAGTTCAATTGGTACGTGGACGGCGTGG |
| | | AAGTGCACAACGCCAAGACCAAGCCTAGAGAGGAACAGTACAACAGCAC |
| | | CTACAGAGTGGTGTCCGTGCTGACAGTGCTGCACCAGGATTGGCTGAACG |
| | | GCAAAGAGTACAAGTGCAAGGTGTCCAACAAGGCCCTGCCTGCTCCTATC |
| | | GAGAAAACCATCAGCAAGGCCAAGGGCCAGCCTAGGGAACCCCAGGTTTA |
| | | CACCCTGCCTCCATGCCGCGACGAACTGACCAAGAACCAGGTGTCCCTGTGG |
| | | TGCCTGGTCAAGGGCTTCTACCCTTCCGATATCGCCGTGGAATGGGAGAGC |
| | | AATGGCCAGCCTGAGAACAACTACAAGACAACCCCTCCTGTGCTGGACAGC |
| | | GACGGCTCATTCTTCCTGTACAGCAAGCTGACAGTGGACAAGAGCAGATGG |
| | | CAGCAGGGCAACGTGTTCAGCTGCAGCGTGCTGCATGAAGCCCTGCACAGC |
| | | CACTACACCCAGAAGTCCCTGTCTCTGAGCCCCGGCAAGTGATAA |
| | | (SEQ ID NO: 559) |
| | Hinge (C/S)-CH2 | GAACCTAAGAGCAGCGACAAGACCCACACCTGTCCTCCATGTCCTGCTCCA |
| | (GAALIE)-CH3 | GAACTGCTGGCCGGACCTTCCGTGTTCCTGTTTCCTCCAAAGCCTAAGGAC |
| | (cak-LS) | ACCCTGATGATCAGCAGAACCCCTGAAGTGACCTGCGTGGTGGTGGATGT |
| | (G1m17, 1) | GTCTCACGAGGACCCTGAAGTGAAGTTCAATTGGTACGTGGACGGCGTGG |
| | | AAGTGCACAACGCCAAGACCAAGCCTAGAGAGGAACAGTACAACAGCAC |
| | | CTACAGAGTGGTGTCCGTGCTGACCGTGCTGCACCAGGATTGGCTGAACG |
| | | GCAAAGAGTACAAGTGCAAGGTGTCCAACAAGGCCCTGCCTCTGCCTGAG |
| | | GAAAAGACCATCAGCAAGGCCAAGGGCCAGCCTAGGGAACCCCAGGTTTA |
| | | CACCCTGCCTCCATGCCGCGACGAACTGACCAAGAACCAGGTGTCCCTGTGG |
| | | TGCCTGGTCAAGGGCTTCTACCCTTCCGATATCGCCGTGGAATGGGAGAGC |
| | | AATGGCCAGCCTGAGAACAACTACAAGACAACCCCTCCTGTGCTGGACAGC |
| | | GACGGCTCATTCTTCCTGTACAGCAAGCTGACAGTGGACAAGAGCAGATGG |
| | | CAGCAGGGCAACGTGTTCAGCTGCAGCGTGCTGCATGAAGCCCTGCACAGC |
| | | CACTACACCCAGAAGTCCCTGTCTCTGAGCCCCGGCAAGTGATAA |
| | | (SEQ ID NO: 560) |
| | Hinge (C/S)-CH2 | GAACCTAAGAGCAGCGACAAGACCCACACCTGTCCTCCATGTCCTGCTCCA |
| | (GAIE)-CH3 (cak- | GAACTGCTGGCCGGACCTTCCGTGTTCCTGTTTCCTCCAAAGCCTAAGGAC |
| | LS) (G1m17, 1) | ACCCTGATGATCAGCAGAACCCCTGAAGTGACCTGCGTGGTGGTGGATGT |
| | | GTCTCACGAGGACCCTGAAGTGAAGTTCAATTGGTACGTGGACGGCGTGG |
| | | AAGTGCACAACGCCAAGACCAAGCCTAGAGAGGAACAGTACAACAGCAC |
| | | CTACAGAGTGGTGTCCGTGCTGACCGTGCTGCACCAGGATTGGCTGAACG |
| | | GCAAAGAGTACAAGTGCAAGGTGTCCAACAAGGCCCTGCCTGCCCCTGAG |
| | | GAAAAGACCATCAGCAAGGCCAAGGGCCAGCCTAGGGAACCCCAGGTTTA |
| | | CACCCTGCCTCCATGCCGCGACGAACTGACCAAGAACCAGGTGTCCCTGTGG |
| | | TGCCTGGTCAAGGGCTTCTACCCTTCCGATATCGCCGTGGAATGGGAGAGC |
| | | AATGGCCAGCCTGAGAACAACTACAAGACAACCCCTCCTGTGCTGGACAGC |
| | | GACGGCTCATTCTTCCTGTACAGCAAGCTGACAGTGGACAAGAGCAGATGG |
| | | CAGCAGGGCAACGTGTTCAGCTGCAGCGTGCTGCATGAAGCCCTGCACAGC |
| | | CACTACACCCAGAAGTCCCTGTCTCTGAGCCCCGGCAAGTGATAA |
| | | (SEQ ID NO: 561) |
| General | Hinge (C/S)-CH2— | GAACCTAAGAGCAGCGACAAGACCCACACCTGTCCTCCATGTCCTGCTCCAG |
| | CH3 (G1m3) | AACTGCTCGGCGGACCTTCCGTGTTCCTGTTTCCTCCAAAGCCTAAGGACAC |
| | | CCTGATGATCAGCAGAACCCCTGAAGTGACCTGCGTGGTGGTGGATGTGT |
| | | CTCACGAGGACCCAGAAGTGAAGTTCAATTGGTACGTGGACGGCGTGGAA |
| | | GTGCACAACGCCAAGACCAAGCCTAGAGAGGAACAGTACAACAGCACCTA |
| | | CAGAGTGGTGTCCGTGCTGACAGTGCTGCACCAGGATTGGCTGAACGGCA |
| | | AAGAGTACAAGTGCAAGGTGTCCAACAAGGCCCTGCCTGCTCCTATCGAG |
| | | AAAACCATCAGCAAGGCCAAGGGCCAGCCTAGGGAACCCCAGGTTTACAC |
| | | ACTGCCTCCAAGCCGCGAGGAAATGACCAAGAACCAGGTGTCCCTGACCTG |
| | | CCTCGTGAAGGGCTTCTACCCTTCCGATATCGCCGTGGAATGGGAGAGCAAT |
| | | GGCCAGCCTGAGAACAACTACAAGACAACCCCTCCTGTGCTGGACAGCGAC |
| | | GGCTCATTCTTCCTGTACAGCAAGCTGACTGTGGATAAGTCCCGGTGGCAGC |
| | | AGGGCAACGTGTTCAGCTGTTCTGTGATGCACGAAGCCCTGCACAACCACTA |
| | | CACCCAGAAAAGCCTGTCTCTGAGCCCCGGCAAGTGATAA |
| | | (SEQ ID NO: 562) |
| | Hinge (C/S)-CH2 | GAACCTAAGAGCAGCGACAAGACCCACACCTGTCCTCCATGTCCTGCTCCAG |
| | (GAALIE)-CH3 (LS) | AACTGCTGGCCGGACCTTCCGTGTTCCTGTTTCCTCCAAAGCCTAAGGACAC |
| | (G1m3) | CCTGATGATCAGCAGAACCCCTGAAGTGACCTGCGTGGTGGTGGATGTGT |
| | | CTCACGAGGACCCTGAAGTGAAGTTCAATTGGTACGTGGACGGCGTGGAA |
| | | GTGCACAACGCCAAGACCAAGCCTAGAGAGGAACAGTACAACAGCACCTA |
| | | CAGAGTGGTGTCCGTGCTGACCGTGCTGCACCAGGATTGGCTGAACGGCA |
| | | AAGAGTACAAGTGCAAGGTGTCCAACAAGGCCCTGCCTCTGCCTGAGGAA |
| | | AAGACCATCAGCAAGGCCAAGGGCCAGCCTAGGGAACCCCAGGTTTACAC |
| | | ACTGCCTCCAAGCCGCGAGGAAATGACCAAGAACCAGGTGTCCCTGACCTG |
| | | CCTCGTGAAGGGCTTCTACCCTTCCGATATCGCCGTGGAATGGGAGAGCAAT |
| | | GGCCAGCCTGAGAACAACTACAAGACAACCCCTCCTGTGCTGGACAGCGAC |
| | | GGCTCATTCTTCCTGTACAGCAAGCTGACCGTGGACAAGTCCAGATGGCAGC |
| | | AGGGCAACGTGTTCAGCTGTAGCGTGCTGCACGAAGCCCTGCACAGCCACT |
| | | ACACCCAGAAAAGCCTGTCTCTGAGCCCCGGCAAATGATAA |
| | | (SEQ ID NO: 563) |
| | Hinge (C/S)-CH2 | GAACCTAAGAGCAGCGACAAGACCCACACCTGTCCTCCATGTCCTGCTCCAG |
| | (GAIE)-CH3 (LS) | AACTGCTGGCCGGACCTTCCGTGTTCCTGTTTCCTCCAAAGCCTAAGGACAC |
| | (G1m3) | CCTGATGATCAGCAGAACCCCTGAAGTGACCTGCGTGGTGGTGGATGTGT |
| | | CTCACGAGGACCCTGAAGTGAAGTTCAATTGGTACGTGGACGGCGTGGAA |
| | | GTGCACAACGCCAAGACCAAGCCTAGAGAGGAACAGTACAACAGCACCTA |
| | | CAGAGTGGTGTCCGTGCTGACCGTGCTGCACCAGGATTGGCTGAACGGCA |
| | | AAGAGTACAAGTGCAAGGTGTCCAACAAGGCCCTGCCTGCCCCTGAGGAA |
| | | AAGACCATCAGCAAGGCCAAGGGCCAGCCTAGGGAACCCCAGGTTTACAC |
| | | ACTGCCTCCAAGCCGCGAGGAAATGACCAAGAACCAGGTGTCCCTGACCTG |
| | | CCTCGTGAAGGGCTTCTACCCTTCCGATATCGCCGTGGAATGGGAGAGCAAT |
| | | GGCCAGCCTGAGAACAACTACAAGACAACCCCTCCTGTGCTGGACAGCGAC |
| | | GGCTCATTCTTCCTGTACAGCAAGCTGACCGTGGACAAGTCCAGATGGCAGC |
| | | AGGGCAACGTGTTCAGCTGTAGCGTGCTGCACGAAGCCCTGCACAGCCACT |
| | | ACACCCAGAAAAGCCTGTCTCTGAGCCCCGGCAAATGATAA |
| | | (SEQ ID NO: 564) |
| | Hinge (C/S)-CH2— | GAACCTAAGAGCAGCGACAAGACCCACACCTGTCCTCCATGTCCTGCTCCAG |
| | CH3 (G1m17) | AACTGCTCGGCGGACCTTCCGTGTTCCTGTTTCCTCCAAAGCCTAAGGACAC |
| | | CCTGATGATCAGCAGAACCCCTGAAGTGACCTGCGTGGTGGTGGATGTGT |
| | | CTCACGAGGACCCAGAAGTGAAGTTCAATTGGTACGTGGACGGCGTGGAA |
| | | GTGCACAACGCCAAGACCAAGCCTAGAGAGGAACAGTACAACAGCACCTA |
| | | CAGAGTGGTGTCCGTGCTGACAGTGCTGCACCAGGATTGGCTGAACGGCA |
| | | AAGAGTACAAGTGCAAGGTGTCCAACAAGGCCCTGCCTGCTCCTATCGAG |
| | | AAAACCATCAGCAAGGCCAAGGGCCAGCCTAGGGAACCCCAGGTTTACAC |
| | | ACTGCCTCCAAGCCGCGAGGAAATGACCAAGAACCAGGTGTCCCTGACCTG |
| | | CCTCGTGAAGGGCTTCTACCCTTCCGATATCGCCGTGGAATGGGAGAGCAAT |
| | | GGCCAGCCTGAGAACAACTACAAGACAACCCCTCCTGTGCTGGACAGCGAC |
| | | GGCTCATTCTTCCTGTACAGCAAGCTGACTGTGGATAAGTCCCGGTGGCAGC |
| | | AGGGCAACGTGTTCAGCTGTTCTGTGATGCACGAAGCCCTGCACAACCACTA |
| | | CACCCAGAAAAGCCTGTCTCTGAGCCCCGGCAAGTGATAA |
| | | (SEQ ID NO: 565) |
| | Hinge (C/S)-CH2— | GAACCTAAGAGCAGCGACAAGACCCACACCTGTCCTCCATGTCCTGCTCCAG |
| | CH3 (LS) (G1m17) | AACTGCTCGGCGGACCTTCCGTGTTCCTGTTTCCTCCAAAGCCTAAGGACAC |
| | | CCTGATGATCAGCAGAACCCCTGAAGTGACCTGCGTGGTGGTGGATGTGT |
| | | CTCACGAGGACCCAGAAGTGAAGTTCAATTGGTACGTGGACGGCGTGGAA |
| | | GTGCACAACGCCAAGACCAAGCCTAGAGAGGAACAGTACAACAGCACCTA |
| | | CAGAGTGGTGTCCGTGCTGACAGTGCTGCACCAGGATTGGCTGAACGGCA |
| | | AAGAGTACAAGTGCAAGGTGTCCAACAAGGCCCTGCCTGCTCCTATCGAG |
| | | AAAACCATCAGCAAGGCCAAGGGCCAGCCTAGGGAACCCCAGGTTTACAC |
| | | ACTGCCTCCAAGCCGCGAGGAAATGACCAAGAACCAGGTGTCCCTGACCTG |
| | | CCTCGTGAAGGGCTTCTACCCTTCCGATATCGCCGTGGAATGGGAGAGCAAT |
| | | GGCCAGCCTGAGAACAACTACAAGACAACCCCTCCTGTGCTGGACAGCGAC |
| | | GGCTCATTCTTCCTGTACAGCAAGCTGACCGTGGACAAGTCCAGATGGCAGC |
| | | AGGGCAACGTGTTCAGCTGTAGCGTGCTGCACGAAGCCCTGCACAGCCACT |
| | | ACACCCAGAAAAGCCTGTCTCTGAGCCCCGGCAAATGATAA |
| | | (SEQ ID NO: 566) |
| | Hinge (C/S)-CH2 | GAACCTAAGAGCAGCGACAAGACCCACACCTGTCCTCCATGTCCTGCTCCAG |
| | (GAALIE)-CH3 (LS) | AACTGCTGGCCGGACCTTCCGTGTTCCTGTTTCCTCCAAAGCCTAAGGACAC |
| | (G1m17) | CCTGATGATCAGCAGAACCCCTGAAGTGACCTGCGTGGTGGTGGATGTGT |
| | | CTCACGAGGACCCTGAAGTGAAGTTCAATTGGTACGTGGACGGCGTGGAA |
| | | GTGCACAACGCCAAGACCAAGCCTAGAGAGGAACAGTACAACAGCACCTA |
| | | CAGAGTGGTGTCCGTGCTGACCGTGCTGCACCAGGATTGGCTGAACGGCA |
| | | AAGAGTACAAGTGCAAGGTGTCCAACAAGGCCCTGCCTCTGCCTGAGGAA |
| | | AAGACCATCAGCAAGGCCAAGGGCCAGCCTAGGGAACCCCAGGTTTACAC |
| | | ACTGCCTCCAAGCCGCGAGGAAATGACCAAGAACCAGGTGTCCCTGACCTG |
| | | CCTCGTGAAGGGCTTCTACCCTTCCGATATCGCCGTGGAATGGGAGAGCAAT |
| | | GGCCAGCCTGAGAACAACTACAAGACAACCCCTCCTGTGCTGGACAGCGAC |
| | | GGCTCATTCTTCCTGTACAGCAAGCTGACCGTGGACAAGTCCAGATGGCAGC |
| | | AGGGCAACGTGTTCAGCTGTAGCGTGCTGCACGAAGCCCTGCACAGCCACT |
| | | ACACCCAGAAAAGCCTGTCTCTGAGCCCCGGCAAATGATAA |
| | | (SEQ ID NO: 567) |
| | Hinge (C/S)-CH2 | GAACCTAAGAGCAGCGACAAGACCCACACCTGTCCTCCATGTCCTGCTCCAG |
| | (GAIE)-CH3 (LS) | AACTGCTGGCCGGACCTTCCGTGTTCCTGTTTCCTCCAAAGCCTAAGGACAC |
| | (G1m17) | CCTGATGATCAGCAGAACCCCTGAAGTGACCTGCGTGGTGGTGGATGTGT |
| | | CTCACGAGGACCCTGAAGTGAAGTTCAATTGGTACGTGGACGGCGTGGAA |
| | | GTGCACAACGCCAAGACCAAGCCTAGAGAGGAACAGTACAACAGCACCTA |
| | | CAGAGTGGTGTCCGTGCTGACCGTGCTGCACCAGGATTGGCTGAACGGCA |
| | | AAGAGTACAAGTGCAAGGTGTCCAACAAGGCCCTGCCTGCCCCTGAGGAA |
| | | AAGACCATCAGCAAGGCCAAGGGCCAGCCTAGGGAACCCCAGGTTTACAC |
| | | ACTGCCTCCAAGCCGCGAGGAAATGACCAAGAACCAGGTGTCCCTGACCTG |
| | | CCTCGTGAAGGGCTTCTACCCTTCCGATATCGCCGTGGAATGGGAGAGCAAT |
| | | GGCCAGCCTGAGAACAACTACAAGACAACCCCTCCTGTGCTGGACAGCGAC |
| | | GGCTCATTCTTCCTGTACAGCAAGCTGACCGTGGACAAGTCCAGATGGCAGC |
| | | AGGGCAACGTGTTCAGCTGTAGCGTGCTGCACGAAGCCCTGCACAGCCACT |
| | | ACACCCAGAAAAGCCTGTCTCTGAGCCCCGGCAAATGATAA |
| | | (SEQ ID NO: 568) |
| | Hinge (C/S)-CH2— | GAACCTAAGAGCAGCGACAAGACCCACACCTGTCCTCCATGTCCTGCTCCAG |
| | CH3 (G1m17, 1) | AACTGCTCGGCGGACCTTCCGTGTTCCTGTTTCCTCCAAAGCCTAAGGACAC |
| | | CCTGATGATCAGCAGAACCCCTGAAGTGACCTGCGTGGTGGTGGATGTGT |
| | | CTCACGAGGACCCAGAAGTGAAGTTCAATTGGTACGTGGACGGCGTGGAA |
| | | GTGCACAACGCCAAGACCAAGCCTAGAGAGGAACAGTACAACAGCACCTA |
| | | CAGAGTGGTGTCCGTGCTGACAGTGCTGCACCAGGATTGGCTGAACGGCA |
| | | AAGAGTACAAGTGCAAGGTGTCCAACAAGGCCCTGCCTGCTCCTATCGAG |
| | | AAAACCATCAGCAAGGCCAAGGGCCAGCCTAGGGAACCCCAGGTTTACAC |
| | | ACTGCCTCCAAGCCGCGACGAACTGACCAAGAACCAGGTGTCCCTGACCTGC |
| | | CTCGTGAAGGGCTTCTACCCTTCCGATATCGCCGTGGAATGGGAGAGCAAT |
| | | GGCCAGCCTGAGAACAACTACAAGACAACCCCTCCTGTGCTGGACAGCGAC |
| | | GGCTCATTCTTCCTGTACAGCAAGCTGACTGTGGATAAGTCCCGGTGGCAGC |
| | | AGGGCAACGTGTTCAGCTGTTCTGTGATGCACGAAGCCCTGCACAACCACTA |
| | | CACCCAGAAAAGCCTGTCTCTGAGCCCCGGCAAGTGATAA |
| | | (SEQ ID NO: 569) |
| | Hinge (C/S)-CH2— | GAACCTAAGAGCAGCGACAAGACCCACACCTGTCCTCCATGTCCTGCTCCAG |
| | CH3 (LS) | AACTGCTCGGCGGACCTTCCGTGTTCCTGTTTCCTCCAAAGCCTAAGGACAC |
| | (G1m17, 1) | CCTGATGATCAGCAGAACCCCTGAAGTGACCTGCGTGGTGGTGGATGTGT |
| | | CTCACGAGGACCCAGAAGTGAAGTTCAATTGGTACGTGGACGGCGTGGAA |
| | | GTGCACAACGCCAAGACCAAGCCTAGAGAGGAACAGTACAACAGCACCTA |
| | | CAGAGTGGTGTCCGTGCTGACAGTGCTGCACCAGGATTGGCTGAACGGCA |
| | | AAGAGTACAAGTGCAAGGTGTCCAACAAGGCCCTGCCTGCTCCTATCGAG |
| | | AAAACCATCAGCAAGGCCAAGGGCCAGCCTAGGGAACCCCAGGTTTACAC |
| | | ACTGCCTCCAAGCCGCGACGAACTGACCAAGAACCAGGTGTCCCTGACCTGC |
| | | CTCGTGAAGGGCTTCTACCCTTCCGATATCGCCGTGGAATGGGAGAGCAAT |
| | | GGCCAGCCTGAGAACAACTACAAGACAACCCCTCCTGTGCTGGACAGCGAC |
| | | GGCTCATTCTTCCTGTACAGCAAGCTGACCGTGGACAAGTCCAGATGGCAGC |
| | | AGGGCAACGTGTTCAGCTGTAGCGTGCTGCACGAAGCCCTGCACAGCCACT |
| | | ACACCCAGAAAAGCCTGTCTCTGAGCCCCGGCAAATGATAA |
| | | (SEQ ID NO: 570) |
| | Hinge (C/S)-CH2 | GAACCTAAGAGCAGCGACAAGACCCACACCTGTCCTCCATGTCCTGCTCCAG |
| | (GAALIE)-CH3 (LS) | AACTGCTGGCCGGACCTTCCGTGTTCCTGTTTCCTCCAAAGCCTAAGGACAC |
| | (G1m17, 1) | CCTGATGATCAGCAGAACCCCTGAAGTGACCTGCGTGGTGGTGGATGTGT |
| | | CTCACGAGGACCCTGAAGTGAAGTTCAATTGGTACGTGGACGGCGTGGAA |
| | | GTGCACAACGCCAAGACCAAGCCTAGAGAGGAACAGTACAACAGCACCTA |
| | | CAGAGTGGTGTCCGTGCTGACCGTGCTGCACCAGGATTGGCTGAACGGCA |
| | | AAGAGTACAAGTGCAAGGTGTCCAACAAGGCCCTGCCTCTGCCTGAGGAA |
| | | AAGACCATCAGCAAGGCCAAGGGCCAGCCTAGGGAACCCCAGGTTTACAC |
| | | ACTGCCTCCAAGCCGCGACGAACTGACCAAGAACCAGGTGTCCCTGACCTGC |
| | | CTCGTGAAGGGCTTCTACCCTTCCGATATCGCCGTGGAATGGGAGAGCAAT |
| | | GGCCAGCCTGAGAACAACTACAAGACAACCCCTCCTGTGCTGGACAGCGAC |
| | | GGCTCATTCTTCCTGTACAGCAAGCTGACCGTGGACAAGTCCAGATGGCAGC |
| | | AGGGCAACGTGTTCAGCTGTAGCGTGCTGCACGAAGCCCTGCACAGCCACT |
| | | ACACCCAGAAAAGCCTGTCTCTGAGCCCCGGCAAATGATAA |
| | | (SEQ ID NO: 571) |
| | Hinge (C/S)-CH2 | GAACCTAAGAGCAGCGACAAGACCCACACCTGTCCTCCATGTCCTGCTCCAG |
| | (GAIE)-CH3 (LS) | AACTGCTGGCCGGACCTTCCGTGTTCCTGTTTCCTCCAAAGCCTAAGGACAC |
| | (G1m17, 1) | CCTGATGATCAGCAGAACCCCTGAAGTGACCTGCGTGGTGGTGGATGTGT |
| | | CTCACGAGGACCCTGAAGTGAAGTTCAATTGGTACGTGGACGGCGTGGAA |
| | | GTGCACAACGCCAAGACCAAGCCTAGAGAGGAACAGTACAACAGCACCTA |
| | | CAGAGTGGTGTCCGTGCTGACCGTGCTGCACCAGGATTGGCTGAACGGCA |
| | | AAGAGTACAAGTGCAAGGTGTCCAACAAGGCCCTGCCTGCCCCTGAGGAA |
| | | AAGACCATCAGCAAGGCCAAGGGCCAGCCTAGGGAACCCCAGGTTTACAC |
| | | ACTGCCTCCAAGCCGCGACGAACTGACCAAGAACCAGGTGTCCCTGACCTGC |
| | | CTCGTGAAGGGCTTCTACCCTTCCGATATCGCCGTGGAATGGGAGAGCAAT |
| | | GGCCAGCCTGAGAACAACTACAAGACAACCCCTCCTGTGCTGGACAGCGAC |
| | | GGCTCATTCTTCCTGTACAGCAAGCTGACCGTGGACAAGTCCAGATGGCAGC |
| | | AGGGCAACGTGTTCAGCTGTAGCGTGCTGCACGAAGCCCTGCACAGCCACT |
| | | ACACCCAGAAAAGCCTGTCTCTGAGCCCCGGCAAATGATAA |
| | | (SEQ ID NO: 572) |

### Plasmid DNA Preparation

[1254] Plasmid DNA is prepared by selecting E. coli clones for inoculation in Luria-Bertani (LB) medium containing kanamycin. The cultures are grown overnight at 37° C. and ˜150 to 200 rpm. Following cell harvest, purification is done using the QIAGEN Plasmid Plus Maxi Kit according to the manufacturer's instructions. Finally, the concentration is determined by UV spectroscopy. DNA is stored in certified RNase- and DNase-free reaction tubes.

### Linearization and DNA Purification

[1255] Linearization of plasmid DNA is performed using appropriate restriction enzymes, followed by purification of the linearized DNA template using magnetic beads (Dynabeads™ MyOne™ Carboxylic Acid) according to the manufacturer's protocol. The DNA concentration is measured by UV spectroscopy.

### In Vitro Transcription

[1256] CleanCap 413 (m7(3′OMeG)(5′)ppp(5′)(2′OMeA)pG) capped RNA is produced following the process as disclosed, e.g., in WO 2021214204A1, which is incorporated herein by reference in its entirety. Methyl pseudo-uridine is used in the in vitro transcription reaction and incorporated into the produced RNA. Cellulose purification of the resulting RNA is performed to isolate single-stranded RNA, followed by concentration measurement by UV spectroscopy. The RNA integrity is determined by microfluidic-based electrophoresis.

### Example 11: Generation of Polyribonucleotides Encoding 1-18 Monospecific CrossMab^{CH1-CLx} and 1-18 Monospecific CrossMab^{CH1-CLcv}

[1257] In this Example, polyribonucleotides encoding an 1-18 in CrossMab^{CH1-CLx} format (as illustrated e.g., in FIG. 4B) are generated. In CrossMab^{CH1-CLx} format, a CH1 domain is fused to a VL and a CL domain is fused in between a VH and a CH2-CH3 set of domains. By introducing these domain swaps, the resulting CrossMab^{CH1-CLx} chains will specifically pair, while strongly inhibiting binding to wild-type or unmodified immunoglobulin chains. Thus, with this format, non-functional mispairings are strongly reduced.

[1258] Polyribonucleotides encoding an 1-18 in CrossMab^{CH1-CLcv} format (as illustrated e.g., in FIG. 4C) are generated. In CrossMab^{CH1-CLcv} format, a VL is operably linked to a CL domain and a VH is operably linked to a CH1-CH2-CH3 set of domains. To minimize incorrect chain pairing, the CL domain of the immunoglobulin light chain and the CH1 domain of the immunoglobulin heavy chain are modified to include charge variants, which promote pairing of a constant domain with a positive charge to a constant domain with a negative charge.

[1259] Polyribonucleotides encoding the CrossMab^{CH1-CLx} and CrossMab^{CH1-CLcv} formats are cloned into the JR81 vector.

[1260] Objectives of the present Example include:
[1261] (1) Clone 1-18 CrossMab^{CH1-CLx}-encoding DNA Fragment Strings into JR81 backbone; and
[1262] (2) Clone 1-18 CrossMab^{CH1/CLcv}-encoding DNA Fragment Strings into JR81 backbone.

[1263] The methods of the present example include: (1) cloning of DNA fragments into appropriate RNA-expression vector; and (2) verification of selected clones by control digestion and sequencing.

### Codon Optimization and Cloning Strategy

[1264] Codon optimization and cloning are performed as described above in Example 92.

[1265] Exemplary sequences used in the cloning methods for 1-18 CrossMab^{CH1-CLx}-encoding DNA Fragment Strings are shown in Table 22 below. Exemplary nucleotide sequences of the resulting heavy chain- and light chain-encoding plasmid constructs as well as the sequence of the backbone can be found in SEQ ID NO: 700-722 (heavy chain) and SEQ ID NO: 723 (light chain).

TABLE 22
Exemplary sequences in 1-18 CrossMabCH1-CLx encoding polyribonucleotides.

| Feature | Fragment | Nucleotide Sequence |
|---|---|---|
| General | CH1(SS) (G1m17) | AGCAGCGCCTCTACAAAGGGCCCCAGCGTTTTCCCACTGGCTCCT |
| | | AGCAGCAAGAGCACATCTGGCGGAACAGCCGCTCTGGGCTGTCT |
| | | GGTCAAGGACTACTTTCCCGAGCCTGTGACCGTGTCCTGGAATTC |
| | | TGGCGCTCTGACATCCGGCGTGCACACCTTTCCAGCTGTGCTGCA |
| | | AAGCAGCGGCCTGTACTCTCTGAGCAGCGTGGTCACAGTGCCAA |
| | | GCTCTAGCCTGGGCACCCAGACCTACATCTGCAATGTGAACCACA |
| | | AGCCTAGCAACACGAAGGTCGACAAGAAGGTGGAACCCAAGTC |
| | | CTGCTGATAA (SEQ ID NO: 573) |
| | Hinge (ΔEPKSC)-CH2—CH3 | GATAAGACCCACACCTGTCCTCCATGTCCAGCTCCAGAACTGCTC |
| | (G1m3) | GGCGGACCTTCCGTGTTCCTGTTTCCTCCAAAGCCTAAGGACAC |
| | | CCTGATGATCAGCAGAACCCCTGAAGTGACCTGCGTGGTGGTG |
| | | GATGTGTCTCACGAGGACCCAGAAGTGAAGTTCAATTGGTACG |
| | | TGGACGGCGTGGAAGTGCACAACGCCAAGACCAAGCCTAGAG |
| | | AGGAACAGTACAACAGCACCTACAGAGTGGTGTCCGTGCTGAC |
| | | AGTGCTGCACCAGGATTGGCTGAACGGCAAAGAGTACAAGTGC |
| | | AAGGTGTCCAACAAGGCCCTGCCTGCTCCTATCGAGAAAACCAT |
| | | CAGCAAGGCCAAGGGCCAGCCTAGGGAACCCCAGGTTTACACAC |
| | | TGCCTCCAAGCCGCGAGGAAATGACCAAGAACCAGGTGTCCCTG |
| | | ACCTGCCTCGTGAAGGGCTTCTACCCTTCCGATATCGCCGTGGAA |
| | | TGGGAGAGCAATGGCCAGCCTGAGAACAACTACAAGACAACCCC |
| | | TCCTGTGCTGGACAGCGACGGCTCATTCTTCCTGTACAGCAAGCT |
| | | GACTGTGGATAAGTCCCGGTGGCAGCAGGGCAACGTGTTCAGCT |
| | | GTTCTGTGATGCACGAAGCCCTGCACAACCACTACACCCAGAAAA |
| | | GCCTGTCTCTGAGCCCCGGCAAGTGATAA (SEQ ID NO: 574) |
| | Hinge (ΔEPKSC)-CH2—CH3 | GATAAGACCCACACCTGTCCTCCATGTCCAGCTCCAGAACTGCTC |
| | (G1m17) | GGCGGACCTTCCGTGTTCCTGTTTCCTCCAAAGCCTAAGGACAC |
| | | CCTGATGATCAGCAGAACCCCTGAAGTGACCTGCGTGGTGGTG |
| | | GATGTGTCTCACGAGGACCCAGAAGTGAAGTTCAATTGGTACG |
| | | TGGACGGCGTGGAAGTGCACAACGCCAAGACCAAGCCTAGAG |
| | | AGGAACAGTACAACAGCACCTACAGAGTGGTGTCCGTGCTGAC |
| | | AGTGCTGCACCAGGATTGGCTGAACGGCAAAGAGTACAAGTGC |
| | | AAGGTGTCCAACAAGGCCCTGCCTGCTCCTATCGAGAAAACCAT |
| | | CAGCAAGGCCAAGGGCCAGCCTAGGGAACCCCAGGTTTACACAC |
| | | TGCCTCCAAGCCGCGAGGAAATGACCAAGAACCAGGTGTCCCTG |
| | | ACCTGCCTCGTGAAGGGCTTCTACCCTTCCGATATCGCCGTGGAA |
| | | TGGGAGAGCAATGGCCAGCCTGAGAACAACTACAAGACAACCCC |
| | | TCCTGTGCTGGACAGCGACGGCTCATTCTTCCTGTACAGCAAGCT |
| | | GACTGTGGATAAGTCCCGGTGGCAGCAGGGCAACGTGTTCAGCT |
| | | GTTCTGTGATGCACGAAGCCCTGCACAACCACTACACCCAGAAAA |
| | | GCCTGTCTCTGAGCCCCGGCAAGTGATAA (SEQ ID NO: 575) |
| | Hinge (ΔEPKSC)-CH2—CH3 | GATAAGACCCACACCTGTCCTCCATGTCCAGCTCCAGAACTGCTC |
| | (LS) (G1m17) | GGCGGACCTTCCGTGTTCCTGTTTCCTCCAAAGCCTAAGGACAC |
| | | CCTGATGATCAGCAGAACCCCTGAAGTGACCTGCGTGGTGGTG |
| | | GATGTGTCTCACGAGGACCCAGAAGTGAAGTTCAATTGGTACG |
| | | TGGACGGCGTGGAAGTGCACAACGCCAAGACCAAGCCTAGAG |
| | | AGGAACAGTACAACAGCACCTACAGAGTGGTGTCCGTGCTGAC |
| | | AGTGCTGCACCAGGATTGGCTGAACGGCAAAGAGTACAAGTGC |
| | | AAGGTGTCCAACAAGGCCCTGCCTGCTCCTATCGAGAAAACCAT |
| | | CAGCAAGGCCAAGGGCCAGCCTAGGGAACCCCAGGTTTACACAC |
| | | TGCCTCCAAGCCGCGAGGAAATGACCAAGAACCAGGTGTCCCTG |
| | | ACCTGCCTCGTGAAGGGCTTCTACCCTTCCGATATCGCCGTGGAA |
| | | TGGGAGAGCAATGGCCAGCCTGAGAACAACTACAAGACAACCCC |
| | | TCCTGTGCTGGACAGCGACGGCTCATTCTTCCTGTACAGCAAGCT |
| | | GACCGTGGACAAGTCCAGATGGCAGCAGGGCAACGTGTTCAGCT |
| | | GTAGCGTGCTGCACGAAGCCCTGCACAGCCACTACACCCAGAAA |
| | | AGCCTGTCTCTGAGCCCCGGCAAATGATAA (SEQ ID NO: 576) |
| | Hinge (ΔEPKSC)-CH2—CH3 | GATAAGACCCACACCTGTCCTCCATGTCCAGCTCCAGAACTGCTC |
| | (G1m17, 1) | GGCGGACCTTCCGTGTTCCTGTTTCCTCCAAAGCCTAAGGACAC |
| | | CCTGATGATCAGCAGAACCCCTGAAGTGACCTGCGTGGTGGTG |
| | | GATGTGTCTCACGAGGACCCAGAAGTGAAGTTCAATTGGTACG |
| | | TGGACGGCGTGGAAGTGCACAACGCCAAGACCAAGCCTAGAG |
| | | AGGAACAGTACAACAGCACCTACAGAGTGGTGTCCGTGCTGAC |
| | | AGTGCTGCACCAGGATTGGCTGAACGGCAAAGAGTACAAGTGC |
| | | AAGGTGTCCAACAAGGCCCTGCCTGCTCCTATCGAGAAAACCAT |
| | | CAGCAAGGCCAAGGGCCAGCCTAGGGAACCCCAGGTTTACACAC |
| | | TGCCTCCAAGCCGCGACGAACTGACCAAGAACCAGGTGTCCCTG |
| | | ACCTGCCTCGTGAAGGGCTTCTACCCTTCCGATATCGCCGTGGAA |
| | | TGGGAGAGCAATGGCCAGCCTGAGAACAACTACAAGACAACCCC |
| | | TCCTGTGCTGGACAGCGACGGCTCATTCTTCCTGTACAGCAAGCT |
| | | GACTGTGGATAAGTCCCGGTGGCAGCAGGGCAACGTGTTCAGCT |
| | | GTTCTGTGATGCACGAAGCCCTGCACAACCACTACACCCAGAAAA |
| | | GCCTGTCTCTGAGCCCCGGCAAGTGATAA (SEQ ID NO: 577) |
| | Hinge (ΔEPKSC)-CH2—CH3 | GATAAGACCCACACCTGTCCTCCATGTCCAGCTCCAGAACTGCTC |
| | (LS) (G1m17, 1) | GGCGGACCTTCCGTGTTCCTGTTTCCTCCAAAGCCTAAGGACAC |
| | | CCTGATGATCAGCAGAACCCCTGAAGTGACCTGCGTGGTGGTG |
| | | GATGTGTCTCACGAGGACCCAGAAGTGAAGTTCAATTGGTACG |
| | | TGGACGGCGTGGAAGTGCACAACGCCAAGACCAAGCCTAGAG |
| | | AGGAACAGTACAACAGCACCTACAGAGTGGTGTCCGTGCTGAC |
| | | AGTGCTGCACCAGGATTGGCTGAACGGCAAAGAGTACAAGTGC |
| | | AAGGTGTCCAACAAGGCCCTGCCTGCTCCTATCGAGAAAACCAT |
| | | CAGCAAGGCCAAGGGCCAGCCTAGGGAACCCCAGGTTTACACAC |
| | | TGCCTCCAAGCCGCGACGAACTGACCAAGAACCAGGTGTCCCTG |
| | | ACCTGCCTCGTGAAGGGCTTCTACCCTTCCGATATCGCCGTGGAA |
| | | TGGGAGAGCAATGGCCAGCCTGAGAACAACTACAAGACAACCCC |
| | | TCCTGTGCTGGACAGCGACGGCTCATTCTTCCTGTACAGCAAGCT |
| | | GACCGTGGACAAGTCCAGATGGCAGCAGGGCAACGTGTTCAGCT |
| | | GTAGCGTGCTGCACGAAGCCCTGCACAGCCACTACACCCAGAAA |
| | | AGCCTGTCTCTGAGCCCCGGCAAATGATAA (SEQ ID NO: 578) |
| General | CH1(SS) (G1m17) | AGCAGCGCCTCTACAAAGGGCCCCAGCGTTTTCCCACTGGCTCCT |
| | | AGCAGCAAGAGCACATCTGGCGGAACAGCCGCTCTGGGCTGTCT |
| | | GGTCAAGGACTACTTTCCCGAGCCTGTGACCGTGTCCTGGAATTC |
| | | TGGCGCTCTGACATCCGGCGTGCACACCTTTCCAGCTGTGCTGCA |
| | | AAGCAGCGGCCTGTACTCTCTGAGCAGCGTGGTCACAGTGCCAA |
| | | GCTCTAGCCTGGGCACCCAGACCTACATCTGCAATGTGAACCACA |
| | | AGCCTAGCAACACGAAGGTCGACAAGAAGGTGGAACCCAAGTC |
| | | CTGCTGATAA (SEQ ID NO: 579) |
| | Hinge (ΔEPKSC)-CH2—CH3 | GATAAGACCCACACCTGTCCTCCATGTCCAGCTCCAGAACTGCTC |
| | (G1m3) | GGCGGACCTTCCGTGTTCCTGTTTCCTCCAAAGCCTAAGGACAC |
| | | CCTGATGATCAGCAGAACCCCTGAAGTGACCTGCGTGGTGGTG |
| | | GATGTGTCTCACGAGGACCCAGAAGTGAAGTTCAATTGGTACG |
| | | TGGACGGCGTGGAAGTGCACAACGCCAAGACCAAGCCTAGAG |
| | | AGGAACAGTACAACAGCACCTACAGAGTGGTGTCCGTGCTGAC |
| | | AGTGCTGCACCAGGATTGGCTGAACGGCAAAGAGTACAAGTGC |
| | | AAGGTGTCCAACAAGGCCCTGCCTGCTCCTATCGAGAAAACCAT |
| | | CAGCAAGGCCAAGGGCCAGCCTAGGGAACCCCAGGTTTACACAC |
| | | TGCCTCCAAGCCGCGAGGAAATGACCAAGAACCAGGTGTCCCTG |
| | | ACCTGCCTCGTGAAGGGCTTCTACCCTTCCGATATCGCCGTGGAA |
| | | TGGGAGAGCAATGGCCAGCCTGAGAACAACTACAAGACAACCCC |
| | | TCCTGTGCTGGACAGCGACGGCTCATTCTTCCTGTACAGCAAGCT |
| | | GACTGTGGATAAGTCCCGGTGGCAGCAGGGCAACGTGTTCAGCT |
| | | GTTCTGTGATGCACGAAGCCCTGCACAACCACTACACCCAGAAAA |
| | | GCCTGTCTCTGAGCCCCGGCAAGTGATAA (SEQ ID NO: 580) |
| | Hinge (ΔEPKSC)-CH2—CH3 | GATAAGACCCACACCTGTCCTCCATGTCCAGCTCCAGAACTGCTC |
| | (G1m17) | GGCGGACCTTCCGTGTTCCTGTTTCCTCCAAAGCCTAAGGACAC |
| | | CCTGATGATCAGCAGAACCCCTGAAGTGACCTGCGTGGTGGTG |
| | | GATGTGTCTCACGAGGACCCAGAAGTGAAGTTCAATTGGTACG |
| | | TGGACGGCGTGGAAGTGCACAACGCCAAGACCAAGCCTAGAG |
| | | AGGAACAGTACAACAGCACCTACAGAGTGGTGTCCGTGCTGAC |
| | | AGTGCTGCACCAGGATTGGCTGAACGGCAAAGAGTACAAGTGC |
| | | AAGGTGTCCAACAAGGCCCTGCCTGCTCCTATCGAGAAAACCAT |
| | | CAGCAAGGCCAAGGGCCAGCCTAGGGAACCCCAGGTTTACACAC |
| | | TGCCTCCAAGCCGCGAGGAAATGACCAAGAACCAGGTGTCCCTG |
| | | ACCTGCCTCGTGAAGGGCTTCTACCCTTCCGATATCGCCGTGGAA |
| | | TGGGAGAGCAATGGCCAGCCTGAGAACAACTACAAGACAACCCC |
| | | TCCTGTGCTGGACAGCGACGGCTCATTCTTCCTGTACAGCAAGCT |
| | | GACTGTGGATAAGTCCCGGTGGCAGCAGGGCAACGTGTTCAGCT |
| | | GTTCTGTGATGCACGAAGCCCTGCACAACCACTACACCCAGAAAA |
| | | GCCTGTCTCTGAGCCCCGGCAAGTGATAA (SEQ ID NO: 581) |
| | Hinge (ΔEPKSC)-CH2—CH3 | GATAAGACCCACACCTGTCCTCCATGTCCAGCTCCAGAACTGCTC |
| | (LS) (G1m17) | GGCGGACCTTCCGTGTTCCTGTTTCCTCCAAAGCCTAAGGACAC |
| | | CCTGATGATCAGCAGAACCCCTGAAGTGACCTGCGTGGTGGTG |
| | | GATGTGTCTCACGAGGACCCAGAAGTGAAGTTCAATTGGTACG |
| | | TGGACGGCGTGGAAGTGCACAACGCCAAGACCAAGCCTAGAG |
| | | AGGAACAGTACAACAGCACCTACAGAGTGGTGTCCGTGCTGAC |
| | | AGTGCTGCACCAGGATTGGCTGAACGGCAAAGAGTACAAGTGC |
| | | AAGGTGTCCAACAAGGCCCTGCCTGCTCCTATCGAGAAAACCAT |
| | | CAGCAAGGCCAAGGGCCAGCCTAGGGAACCCCAGGTTTACACAC |
| | | TGCCTCCAAGCCGCGAGGAAATGACCAAGAACCAGGTGTCCCTG |
| | | ACCTGCCTCGTGAAGGGCTTCTACCCTTCCGATATCGCCGTGGAA |
| | | TGGGAGAGCAATGGCCAGCCTGAGAACAACTACAAGACAACCCC |
| | | TCCTGTGCTGGACAGCGACGGCTCATTCTTCCTGTACAGCAAGCT |
| | | GACCGTGGACAAGTCCAGATGGCAGCAGGGCAACGTGTTCAGCT |
| | | GTAGCGTGCTGCACGAAGCCCTGCACAGCCACTACACCCAGAAA |
| | | AGCCTGTCTCTGAGCCCCGGCAAATGATAA (SEQ ID NO: 582) |
| | Hinge (ΔEPKSC)-CH2—CH3 | GATAAGACCCACACCTGTCCTCCATGTCCAGCTCCAGAACTGCTC |
| | (G1m17, 1) | GGCGGACCTTCCGTGTTCCTGTTTCCTCCAAAGCCTAAGGACAC |
| | | CCTGATGATCAGCAGAACCCCTGAAGTGACCTGCGTGGTGGTG |
| | | GATGTGTCTCACGAGGACCCAGAAGTGAAGTTCAATTGGTACG |
| | | TGGACGGCGTGGAAGTGCACAACGCCAAGACCAAGCCTAGAG |
| | | AGGAACAGTACAACAGCACCTACAGAGTGGTGTCCGTGCTGAC |
| | | AGTGCTGCACCAGGATTGGCTGAACGGCAAAGAGTACAAGTGC |
| | | AAGGTGTCCAACAAGGCCCTGCCTGCTCCTATCGAGAAAACCAT |
| | | CAGCAAGGCCAAGGGCCAGCCTAGGGAACCCCAGGTTTACACAC |
| | | TGCCTCCAAGCCGCGACGAACTGACCAAGAACCAGGTGTCCCTG |
| | | ACCTGCCTCGTGAAGGGCTTCTACCCTTCCGATATCGCCGTGGAA |
| | | TGGGAGAGCAATGGCCAGCCTGAGAACAACTACAAGACAACCCC |
| | | TCCTGTGCTGGACAGCGACGGCTCATTCTTCCTGTACAGCAAGCT |
| | | GACTGTGGATAAGTCCCGGTGGCAGCAGGGCAACGTGTTCAGCT |
| | | GTTCTGTGATGCACGAAGCCCTGCACAACCACTACACCCAGAAAA |
| | | GCCTGTCTCTGAGCCCCGGCAAGTGATAA (SEQ ID NO: 583) |
| | Hinge (ΔEPKSC)-CH2—CH3 | GATAAGACCCACACCTGTCCTCCATGTCCAGCTCCAGAACTGCTC |
| | (LS) (G1m17, 1) | GGCGGACCTTCCGTGTTCCTGTTTCCTCCAAAGCCTAAGGACAC |
| | | CCTGATGATCAGCAGAACCCCTGAAGTGACCTGCGTGGTGGTG |
| | | GATGTGTCTCACGAGGACCCAGAAGTGAAGTTCAATTGGTACG |
| | | TGGACGGCGTGGAAGTGCACAACGCCAAGACCAAGCCTAGAG |
| | | AGGAACAGTACAACAGCACCTACAGAGTGGTGTCCGTGCTGAC |
| | | AGTGCTGCACCAGGATTGGCTGAACGGCAAAGAGTACAAGTGC |
| | | AAGGTGTCCAACAAGGCCCTGCCTGCTCCTATCGAGAAAACCAT |
| | | CAGCAAGGCCAAGGGCCAGCCTAGGGAACCCCAGGTTTACACAC |
| | | TGCCTCCAAGCCGCGACGAACTGACCAAGAACCAGGTGTCCCTG |
| | | ACCTGCCTCGTGAAGGGCTTCTACCCTTCCGATATCGCCGTGGAA |
| | | TGGGAGAGCAATGGCCAGCCTGAGAACAACTACAAGACAACCCC |
| | | TCCTGTGCTGGACAGCGACGGCTCATTCTTCCTGTACAGCAAGCT |
| | | GACCGTGGACAAGTCCAGATGGCAGCAGGGCAACGTGTTCAGCT |
| | | GTAGCGTGCTGCACGAAGCCCTGCACAGCCACTACACCCAGAAA |
| | | AGCCTGTCTCTGAGCCCCGGCAAATGATAA (SEQ ID NO: 584) |

[1266] Exemplary sequences used in the cloning methods for 1-18 CrossMabCH1-CLcv-encoding DNA Fragment Strings are shown in Table 23 below. Exemplary nucleotide sequences of the resulting heavy chain- and light chain-encoding plasmid constructs as well as the sequence of the backbone can be found in SEQ ID NO: 724-747 (heavy chain) and SEQ ID NO: 748 (light chain).

TABLE 23
(i) Exemplary sequences in 1-18 CrossMab^{CH1-CLcv} encoding polyribonucleotides.

| Feature | Fragment | Nucleotide Sequence |
|---|---|---|
| General | CH1cv (G1m17) | GCTTCCACAAAGGGCCCTAGCGTGTTCCCTCTGGCTCCTAGCAGC |
| | | AAGTCTACAAGCGGAGGAACAGCTGCCCTGGGCTGCCTGGTGG |
| | | AAGATTACTTTCCTGAGCCTGTGACCGTGTCCTGGAACAGCGGT |
| | | GCTCTGACTTCTGGCGTGCACACCTTTCCAGCCGTGCTGCAAAGC |
| | | AGCGGCCTGTACTCTCTGAGCAGCGTGGTCACAGTGCCAAGCTC |
| | | TAGCCTGGGCACCCAGACCTACATCTGCAATGTGAACCACAAGC |
| | | CTAGCAACACCAAGGTGGACGACAAGGTG (SEQ ID NO: 585) |
| | CH1cv (G1m17, 1) | GCTTCCACAAAGGGCCCTAGCGTGTTCCCTCTGGCTCCTAGCAGC |
| | | AAGTCTACAAGCGGAGGAACAGCTGCCCTGGGCTGCCTGGTGG |
| | | AAGATTACTTTCCTGAGCCTGTGACCGTGTCCTGGAACAGCGGT |
| | | GCTCTGACTTCTGGCGTGCACACCTTTCCAGCCGTGCTGCAAAGC |
| | | AGCGGCCTGTACTCTCTGAGCAGCGTGGTCACAGTGCCAAGCTC |
| | | TAGCCTGGGCACCCAGACCTACATCTGCAATGTGAACCACAAGC |
| | | CTAGCAACACCAAGGTGGACGACAAGGTG (SEQ ID NO: 586) |
| | Hinge-CH2 CH3 (G1m3) | GAACCCAAGAGCTGCGACAAGACCCACACCTGTCCTCCATGTCCT |
| | | GCTCCAGAACTGCTCGGCGGACCTTCCGTGTTCCTGTTTCCTCCA |
| | | AAGCCTAAGGACACCCTGATGATCAGCAGAACCCCTGAAGTGAC |
| | | CTGCGTGGTGGTGGATGTGTCTCACGAGGACCCAGAAGTGAAGT |
| | | TCAATTGGTACGTGGACGGCGTGGAAGTGCACAACGCCAAGACC |
| | | AAGCCTAGAGAGGAACAGTACAACAGCACCTACAGAGTGGTGT |
| | | CCGTGCTGACAGTGCTGCACCAGGATTGGCTGAACGGCAAAGA |
| | | GTACAAGTGCAAGGTGTCCAACAAGGCCCTGCCTGCTCCTATCGA |
| | | GAAAACCATCAGCAAGGCCAAGGGCCAGCCTAGGGAACCCCAG |
| | | GTTTACACACTGCCTCCAAGCCGCGAGGAAATGACCAAGAACCAG |
| | | GTGTCCCTGACCTGCCTCGTGAAGGGCTTCTACCCTTCCGATATCGC |
| | | CGTGGAATGGGAGAGCAATGGCCAGCCTGAGAACAACTACAAGA |
| | | CAACCCCTCCTGTGCTGGACAGCGACGGCTCATTCTTCCTGTACAG |
| | | CAAGCTGACTGTGGATAAGTCCCGGTGGCAGCAGGGCAACGTGTT |
| | | CAGCTGTTCTGTGATGCACGAAGCCCTGCACAACCACTACACCCAG |
| | | AAAAGCCTGTCTCTGAGCCCCGGCAAGTGATAA (SEQ ID NO: 587) |
| | Hinge-CH2 (GAIE)-CH3 (LS) | GAACCCAAGAGCTGCGACAAGACCCACACCTGTCCTCCATGTCCT |
| | (G1m3) | GCTCCAGAACTGCTGGCCGGACCTTCCGTGTTCCTGTTTCCTCCA |
| | | AAGCCTAAGGACACCCTGATGATCAGCAGAACCCCTGAAGTGA |
| | | CCTGCGTGGTGGTGGATGTGTCTCACGAGGACCCTGAAGTGAA |
| | | GTTCAATTGGTACGTGGACGGCGTGGAAGTGCACAACGCCAAG |
| | | ACCAAGCCTAGAGAGGAACAGTACAACAGCACCTACAGAGTG |
| | | GTGTCCGTGCTGACCGTGCTGCACCAGGATTGGCTGAACGGCA |
| | | AAGAGTACAAGTGCAAGGTGTCCAACAAGGCCCTGCCTGCCCC |
| | | TGAGGAAAAGACCATCAGCAAGGCCAAGGGCCAGCCTAGGGA |
| | | ACCCCAGGTTTACACACTGCCTCCAAGCCGCGAGGAAATGACCAA |
| | | GAACCAGGTGTCCCTGACCTGCCTCGTGAAGGGCTTCTACCCTTC |
| | | CGATATCGCCGTGGAATGGGAGAGCAATGGCCAGCCTGAGAAC |
| | | AACTACAAGACAACCCCTCCTGTGCTGGACAGCGACGGCTCATTC |
| | | TTCCTGTACAGCAAGCTGACCGTGGACAAGTCCAGATGGCAGCA |
| | | GGGCAACGTGTTCAGCTGTAGCGTGCTGCACGAAGCCCTGCACA |
| | | GCCACTACACCCAGAAAAGCCTGTCTCTGAGCCCCGGCAAATGAT |
| | | AA (SEQ ID NO: 588) |
| | Hinge-CH2 CH3 (G1m17) | GAACCCAAGAGCTGCGACAAGACCCACACCTGTCCTCCATGTCCT |
| | | GCTCCAGAACTGCTCGGCGGACCTTCCGTGTTCCTGTTTCCTCCA |
| | | AAGCCTAAGGACACCCTGATGATCAGCAGAACCCCTGAAGTGA |
| | | CCTGCGTGGTGGTGGATGTGTCTCACGAGGACCCAGAAGTGAA |
| | | GTTCAATTGGTACGTGGACGGCGTGGAAGTGCACAACGCCAAG |
| | | ACCAAGCCTAGAGAGGAACAGTACAACAGCACCTACAGAGTG |
| | | GTGTCCGTGCTGACAGTGCTGCACCAGGATTGGCTGAACGGCA |
| | | AAGAGTACAAGTGCAAGGTGTCCAACAAGGCCCTGCCTGCTCC |
| | | TATCGAGAAAACCATCAGCAAGGCCAAGGGCCAGCCTAGGGAA |
| | | CCCCAGGTTTACACACTGCCTCCAAGCCGCGAGGAAATGACCAA |
| | | GAACCAGGTGTCCCTGACCTGCCTCGTGAAGGGCTTCTACCCTTC |
| | | CGATATCGCCGTGGAATGGGAGAGCAATGGCCAGCCTGAGAAC |
| | | AACTACAAGACAACCCCTCCTGTGCTGGACAGCGACGGCTCATTC |
| | | TTCCTGTACAGCAAGCTGACTGTGGATAAGTCCCGGTGGCAGCA |
| | | GGGCAACGTGTTCAGCTGTTCTGTGATGCACGAAGCCCTGCACA |
| | | ACCACTACACCCAGAAAAGCCTGTCTCTGAGCCCCGGCAAGTGAT |
| | | AA (SEQ ID NO: 589) |
| | Hinge-CH2 CH3 (LS) | GAACCCAAGAGCTGCGACAAGACCCACACCTGTCCTCCATGTCCT |
| | (G1m17) | GCTCCAGAACTGCTCGGCGGACCTTCCGTGTTCCTGTTTCCTCCA |
| | | AAGCCTAAGGACACCCTGATGATCAGCAGAACCCCTGAAGTGA |
| | | CCTGCGTGGTGGTGGATGTGTCTCACGAGGACCCAGAAGTGAA |
| | | GTTCAATTGGTACGTGGACGGCGTGGAAGTGCACAACGCCAAG |
| | | ACCAAGCCTAGAGAGGAACAGTACAACAGCACCTACAGAGTG |
| | | GTGTCCGTGCTGACAGTGCTGCACCAGGATTGGCTGAACGGCA |
| | | AAGAGTACAAGTGCAAGGTGTCCAACAAGGCCCTGCCTGCTCC |
| | | TATCGAGAAAACCATCAGCAAGGCCAAGGGCCAGCCTAGGGAA |
| | | CCCCAGGTTTACACACTGCCTCCAAGCCGCGAGGAAATGACCAA |
| | | GAACCAGGTGTCCCTGACCTGCCTCGTGAAGGGCTTCTACCCTTC |
| | | CGATATCGCCGTGGAATGGGAGAGCAATGGCCAGCCTGAGAAC |
| | | AACTACAAGACAACCCCTCCTGTGCTGGACAGCGACGGCTCATTC |
| | | TTCCTGTACAGCAAGCTGACCGTGGACAAGTCCAGATGGCAGCA |
| | | GGGCAACGTGTTCAGCTGTAGCGTGCTGCACGAAGCCCTGCACA |
| | | GCCACTACACCCAGAAAAGCCTGTCTCTGAGCCCCGGCAAATGAT |
| | | AA (SEQ ID NO: 590) |
| | Hinge-CH2 (GAALIE)-CH3 | GAACCCAAGAGCTGCGACAAGACCCACACCTGTCCTCCATGTCCT |
| | (LS) (G1m17) | GCTCCAGAACTGCTGGCCGGACCTTCCGTGTTCCTGTTTCCTCCA |
| | | AAGCCTAAGGACACCCTGATGATCAGCAGAACCCCTGAAGTGA |
| | | CCTGCGTGGTGGTGGATGTGTCTCACGAGGACCCTGAAGTGAA |
| | | GTTCAATTGGTACGTGGACGGCGTGGAAGTGCACAACGCCAAG |
| | | ACCAAGCCTAGAGAGGAACAGTACAACAGCACCTACAGAGTG |
| | | GTGTCCGTGCTGACCGTGCTGCACCAGGATTGGCTGAACGGCA |
| | | AAGAGTACAAGTGCAAGGTGTCCAACAAGGCCCTGCCTCTGCC |
| | | TGAGGAAAAGACCATCAGCAAGGCCAAGGGCCAGCCTAGGGA |
| | | ACCCCAGGTTTACACACTGCCTCCAAGCCGCGAGGAAATGACCAA |
| | | GAACCAGGTGTCCCTGACCTGCCTCGTGAAGGGCTTCTACCCTTC |
| | | CGATATCGCCGTGGAATGGGAGAGCAATGGCCAGCCTGAGAAC |
| | | AACTACAAGACAACCCCTCCTGTGCTGGACAGCGACGGCTCATTC |
| | | TTCCTGTACAGCAAGCTGACCGTGGACAAGTCCAGATGGCAGCA |
| | | GGGCAACGTGTTCAGCTGTAGCGTGCTGCACGAAGCCCTGCACA |
| | | GCCACTACACCCAGAAAAGCCTGTCTCTGAGCCCCGGCAAATGAT |
| | | AA (SEQ ID NO: 591) |
| | Hinge-CH2 (GAIE)-CH3 (LS) | GAACCCAAGAGCTGCGACAAGACCCACACCTGTCCTCCATGTCCT |
| | (G1m17) | GCTCCAGAACTGCTGGCCGGACCTTCCGTGTTCCTGTTTCCTCCA |
| | | AAGCCTAAGGACACCCTGATGATCAGCAGAACCCCTGAAGTGA |
| | | CCTGCGTGGTGGTGGATGTGTCTCACGAGGACCCTGAAGTGAA |
| | | GTTCAATTGGTACGTGGACGGCGTGGAAGTGCACAACGCCAAG |
| | | ACCAAGCCTAGAGAGGAACAGTACAACAGCACCTACAGAGTG |
| | | GTGTCCGTGCTGACCGTGCTGCACCAGGATTGGCTGAACGGCA |
| | | AAGAGTACAAGTGCAAGGTGTCCAACAAGGCCCTGCCTGCCCC |
| | | TGAGGAAAAGACCATCAGCAAGGCCAAGGGCCAGCCTAGGGA |
| | | ACCCCAGGTTTACACACTGCCTCCAAGCCGCGAGGAAATGACCAA |
| | | GAACCAGGTGTCCCTGACCTGCCTCGTGAAGGGCTTCTACCCTTC |
| | | CGATATCGCCGTGGAATGGGAGAGCAATGGCCAGCCTGAGAAC |
| | | AACTACAAGACAACCCCTCCTGTGCTGGACAGCGACGGCTCATTC |
| | | TTCCTGTACAGCAAGCTGACCGTGGACAAGTCCAGATGGCAGCA |
| | | GGGCAACGTGTTCAGCTGTAGCGTGCTGCACGAAGCCCTGCACA |
| | | GCCACTACACCCAGAAAAGCCTGTCTCTGAGCCCCGGCAAATGAT |
| | | AA (SEQ ID NO: 592) |
| | Hinge-CH2 CH3 (G1m17, 1) | GAACCCAAGAGCTGCGACAAGACCCACACCTGTCCTCCATGTCCT |
| | | GCTCCAGAACTGCTCGGCGGACCTTCCGTGTTCCTGTTTCCTCCA |
| | | AAGCCTAAGGACACCCTGATGATCAGCAGAACCCCTGAAGTGA |
| | | CCTGCGTGGTGGTGGATGTGTCTCACGAGGACCCAGAAGTGAA |
| | | GTTCAATTGGTACGTGGACGGCGTGGAAGTGCACAACGCCAAG |
| | | ACCAAGCCTAGAGAGGAACAGTACAACAGCACCTACAGAGTG |
| | | GTGTCCGTGCTGACAGTGCTGCACCAGGATTGGCTGAACGGCA |
| | | AAGAGTACAAGTGCAAGGTGTCCAACAAGGCCCTGCCTGCTCC |
| | | TATCGAGAAAACCATCAGCAAGGCCAAGGGCCAGCCTAGGGAA |
| | | CCCCAGGTTTACACACTGCCTCCAAGCCGCGACGAACTGACCAAG |
| | | AACCAGGTGTCCCTGACCTGCCTCGTGAAGGGCTTCTACCCTTCC |
| | | GATATCGCCGTGGAATGGGAGAGCAATGGCCAGCCTGAGAACA |
| | | ACTACAAGACAACCCCTCCTGTGCTGGACAGCGACGGCTCATTCT |
| | | TCCTGTACAGCAAGCTGACTGTGGATAAGTCCCGGTGGCAGCAG |
| | | GGCAACGTGTTCAGCTGTTCTGTGATGCACGAAGCCCTGCACAAC |
| | | CACTACACCCAGAAAAGCCTGTCTCTGAGCCCCGGCAAGTGATAA |
| | | (SEQ ID NO: 593) |
| | Hinge-CH2 CH3 (LS) | GAACCCAAGAGCTGCGACAAGACCCACACCTGTCCTCCATGTCCT |
| | (G1m17, 1) | GCTCCAGAACTGCTCGGCGGACCTTCCGTGTTCCTGTTTCCTCCA |
| | | AAGCCTAAGGACACCCTGATGATCAGCAGAACCCCTGAAGTGA |
| | | CCTGCGTGGTGGTGGATGTGTCTCACGAGGACCCAGAAGTGAA |
| | | GTTCAATTGGTACGTGGACGGCGTGGAAGTGCACAACGCCAAG |
| | | ACCAAGCCTAGAGAGGAACAGTACAACAGCACCTACAGAGTG |
| | | GTGTCCGTGCTGACAGTGCTGCACCAGGATTGGCTGAACGGCA |
| | | AAGAGTACAAGTGCAAGGTGTCCAACAAGGCCCTGCCTGCTCC |
| | | TATCGAGAAAACCATCAGCAAGGCCAAGGGCCAGCCTAGGGAA |
| | | CCCCAGGTTTACACACTGCCTCCAAGCCGCGACGAACTGACCAAG |
| | | AACCAGGTGTCCCTGACCTGCCTCGTGAAGGGCTTCTACCCTTCC |
| | | GATATCGCCGTGGAATGGGAGAGCAATGGCCAGCCTGAGAACA |
| | | ACTACAAGACAACCCCTCCTGTGCTGGACAGCGACGGCTCATTCT |
| | | TCCTGTACAGCAAGCTGACCGTGGACAAGTCCAGATGGCAGCAG |
| | | GGCAACGTGTTCAGCTGTAGCGTGCTGCACGAAGCCCTGCACAG |
| | | CCACTACACCCAGAAAAGCCTGTCTCTGAGCCCCGGCAAATGATA |
| | | A (SEQ ID NO: 594) |
| | Hinge-CH2 (GAALIE)-CH3 | GAACCCAAGAGCTGCGACAAGACCCACACCTGTCCTCCATGTCCT |
| | (LS) (G1m17, 1) | GCTCCAGAACTGCTGGCCGGACCTTCCGTGTTCCTGTTTCCTCCA |
| | | AAGCCTAAGGACACCCTGATGATCAGCAGAACCCCTGAAGTGA |
| | | CCTGCGTGGTGGTGGATGTGTCTCACGAGGACCCTGAAGTGAA |
| | | GTTCAATTGGTACGTGGACGGCGTGGAAGTGCACAACGCCAAG |
| | | ACCAAGCCTAGAGAGGAACAGTACAACAGCACCTACAGAGTG |
| | | GTGTCCGTGCTGACCGTGCTGCACCAGGATTGGCTGAACGGCA |
| | | AAGAGTACAAGTGCAAGGTGTCCAACAAGGCCCTGCCTCTGCC |
| | | TGAGGAAAAGACCATCAGCAAGGCCAAGGGCCAGCCTAGGGA |
| | | ACCCCAGGTTTACACACTGCCTCCAAGCCGCGACGAACTGACCAA |
| | | GAACCAGGTGTCCCTGACCTGCCTCGTGAAGGGCTTCTACCCTTC |
| | | CGATATCGCCGTGGAATGGGAGAGCAATGGCCAGCCTGAGAAC |
| | | AACTACAAGACAACCCCTCCTGTGCTGGACAGCGACGGCTCATTC |
| | | TTCCTGTACAGCAAGCTGACCGTGGACAAGTCCAGATGGCAGCA |
| | | GGGCAACGTGTTCAGCTGTAGCGTGCTGCACGAAGCCCTGCACA |
| | | GCCACTACACCCAGAAAAGCCTGTCTCTGAGCCCCGGCAAATGAT |
| | | AA (SEQ ID NO: 595) |
| | Hinge-CH2 (GAIE)-CH3 (LS) | GAACCCAAGAGCTGCGACAAGACCCACACCTGTCCTCCATGTCCT |
| | (G1m17, 1) | GCTCCAGAACTGCTGGCCGGACCTTCCGTGTTCCTGTTTCCTCCA |
| | | AAGCCTAAGGACACCCTGATGATCAGCAGAACCCCTGAAGTGA |
| | | CCTGCGTGGTGGTGGATGTGTCTCACGAGGACCCTGAAGTGAA |
| | | GTTCAATTGGTACGTGGACGGCGTGGAAGTGCACAACGCCAAG |
| | | ACCAAGCCTAGAGAGGAACAGTACAACAGCACCTACAGAGTG |
| | | GTGTCCGTGCTGACCGTGCTGCACCAGGATTGGCTGAACGGCA |
| | | AAGAGTACAAGTGCAAGGTGTCCAACAAGGCCCTGCCTGCCCC |
| | | TGAGGAAAAGACCATCAGCAAGGCCAAGGGCCAGCCTAGGGA |
| | | ACCCCAGGTTTACACACTGCCTCCAAGCCGCGACGAACTGACCAA |
| | | GAACCAGGTGTCCCTGACCTGCCTCGTGAAGGGCTTCTACCCTTC |
| | | CGATATCGCCGTGGAATGGGAGAGCAATGGCCAGCCTGAGAAC |
| | | AACTACAAGACAACCCCTCCTGTGCTGGACAGCGACGGCTCATTC |
| | | TTCCTGTACAGCAAGCTGACCGTGGACAAGTCCAGATGGCAGCA |
| | | GGGCAACGTGTTCAGCTGTAGCGTGCTGCACGAAGCCCTGCACA |
| | | GCCACTACACCCAGAAAAGCCTGTCTCTGAGCCCCGGCAAATGAT |
| | | AA (SEQ ID NO: 596) |
| | K-CLcv variant 2 | ATGGATTGGATTTGGAGAATCCTGTTCCTCGTGGGCGCCGCTACC |
| | | GGAGCCCACTCCGAAGTTGTGCTGACACAGAGCCCCGCCATCCTG |
| | | AGTGTTAGCCCTGGCGATAGAGTGATCCTGAGCTGCAGAGCCTCT |
| | | CAGGGCCTCGATTCTTCTCACCTGGCCTGGTACAGATTCAAGCGG |
| | | GGACAGATCCCCACACTGGTCATCTTCGGCACCAGCAACAGAGCC |
| | | AGAGGCACCCCTGATAGATTTTCCGGCTCTGGCAGCGGAGCCGAC |
| | | TTCACCCTGACAATCAGCAGAGTGGAACCCGAGGACTTCGCCACC |
| | | TACTACTGCCAGAGATACGGCGGCACCCCTATCACATTTGGCGGCG |
| | | GAACCACACTGGACAAGAAACGTACGGTGGCCGCTCCTAGCGTG |
| | | TTCATCTTTCCACCTAGCGACAGAAAGCTGAAGTCTGGCACAGCC |
| | | TCTGTCGTGTGCCTGCTCAACAACTTCTACCCCAGAGAAGCCAAG |
| | | GTGCAGTGGAAGGTGGACAACGCCCTGCAGAGCGGCAATAGCCA |
| | | AGAGAGCGTGACCGAGCAGGACAGCAAGGACTCTACCTACAGCC |
| | | TGAGCAGCACACTGACCCTGAGCAAGGCCGACTACGAGAAGCAC |
| | | AAAGTGTACGCCTGCGAAGTGACCCACCAGGGCCTTTCTAGCCCT |
| | | GTGACCAAGAGCTTCAACCGGGGCGAGTGCTGATAA |
| | | (SEQ ID NO: 597 |
| General | Hinge-CH2 (GAIE)-CH3 | GAACCCAAGAGCTGCGACAAGACCCACACCTGTCCTCCATGTCCT |
| | (cah-LS) (G1m3) | GCTCCAGAACTGCTGGCCGGACCTTCCGTGTTCCTGTTTCCTCCA |
| | | AAGCCTAAGGACACCCTGATGATCAGCAGAACCCCTGAAGTGA |
| | | CCTGCGTGGTGGTGGATGTGTCTCACGAGGACCCTGAAGTGAA |
| | | GTTCAATTGGTACGTGGACGGCGTGGAAGTGCACAACGCCAAG |
| | | ACCAAGCCTAGAGAGGAACAGTACAACAGCACCTACAGAGTG |
| | | GTGTCCGTGCTGACCGTGCTGCACCAGGATTGGCTGAACGGCA |
| | | AAGAGTACAAGTGCAAGGTGTCCAACAAGGCCCTGCCTGCCCC |
| | | TGAGGAAAAGACCATCAGCAAGGCCAAGGGCCAGCCTCGCGAA |
| | | CCTCAAGTCTGTACACTGCCTCCTAGCCGCGAGGAAATGACCAAG |
| | | AACCAGGTGTCCCTGAGCTGCGCCGTGAAGGGCTTTTACCCTTCC |
| | | GATATCGCCGTGGAATGGGAGAGCAATGGCCAGCCTGAGAACA |
| | | ACTACAAGACAACCCCTCCTGTGCTGGACAGCGACGGCTCATTCT |
| | | TCCTGGTGTCCAAGCTGACAGTGGACAAGAGCAGATGGCAGCAG |
| | | GGCAACGTGTTCAGCTGCAGCGTGCTGCATGAAGCCCTGCACAG |
| | | CCACTACACCCAGAAGTCCCTGTCTCTGAGCCCCGGCAAGTGATA |
| | | A (SEQ ID NO: 598) |
| | Hinge-CH2 (GAIE)-CH3 | GAACCCAAGAGCTGCGACAAGACCCACACCTGTCCTCCATGTCCT |
| | (cak-LS) (G1m3) | GCTCCAGAACTGCTGGCCGGACCTTCCGTGTTCCTGTTTCCTCCA |
| | | AAGCCTAAGGACACCCTGATGATCAGCAGAACCCCTGAAGTGA |
| | | CCTGCGTGGTGGTGGATGTGTCTCACGAGGACCCTGAAGTGAA |
| | | GTTCAATTGGTACGTGGACGGCGTGGAAGTGCACAACGCCAAG |
| | | ACCAAGCCTAGAGAGGAACAGTACAACAGCACCTACAGAGTG |
| | | GTGTCCGTGCTGACCGTGCTGCACCAGGATTGGCTGAACGGCA |
| | | AAGAGTACAAGTGCAAGGTGTCCAACAAGGCCCTGCCTGCCCC |
| | | TGAGGAAAAGACCATCAGCAAGGCCAAGGGCCAGCCTAGGGA |
| | | ACCCCAGGTTTACACCCTGCCTCCATGCCGCGAGGAAATGACCAA |
| | | GAACCAGGTGTCCCTGTGGTGCCTGGTCAAGGGCTTCTACCCTTC |
| | | CGATATCGCCGTGGAATGGGAGAGCAATGGCCAGCCTGAGAAC |
| | | AACTACAAGACAACCCCTCCTGTGCTGGACAGCGACGGCTCATTC |
| | | TTCCTGTACAGCAAGCTGACAGTGGACAAGAGCAGATGGCAGCA |
| | | GGGCAACGTGTTCAGCTGCAGCGTGCTGCATGAAGCCCTGCACA |
| | | GCCACTACACCCAGAAGTCCCTGTCTCTGAGCCCCGGCAAGTGAT |
| | | AA (SEQ ID NO: 599) |
| | Hinge-CH2 CH3 (cah-LS) | GAACCCAAGAGCTGCGACAAGACCCACACCTGTCCTCCATGTCCT |
| | (G1m17) | GCTCCAGAACTGCTCGGCGGACCTTCCGTGTTCCTGTTTCCTCCA |
| | | AAGCCTAAGGACACCCTGATGATCAGCAGAACCCCTGAAGTGA |
| | | CCTGCGTGGTGGTGGATGTGTCTCACGAGGACCCAGAAGTGAA |
| | | GTTCAATTGGTACGTGGACGGCGTGGAAGTGCACAACGCCAAG |
| | | ACCAAGCCTAGAGAGGAACAGTACAACAGCACCTACAGAGTG |
| | | GTGTCCGTGCTGACAGTGCTGCACCAGGATTGGCTGAACGGCA |
| | | AAGAGTACAAGTGCAAGGTGTCCAACAAGGCCCTGCCTGCTCC |
| | | TATCGAGAAAACCATCAGCAAGGCCAAGGGCCAGCCTCGCGAA |
| | | CCTCAAGTCTGTACACTGCCTCCTAGCCGCGAGGAAATGACCAAG |
| | | AACCAGGTGTCCCTGAGCTGCGCCGTGAAGGGCTTTTACCCTTCC |
| | | GATATCGCCGTGGAATGGGAGAGCAATGGCCAGCCTGAGAACA |
| | | ACTACAAGACAACCCCTCCTGTGCTGGACAGCGACGGCTCATTCT |
| | | TCCTGGTGTCCAAGCTGACAGTGGACAAGAGCAGATGGCAGCAG |
| | | GGCAACGTGTTCAGCTGCAGCGTGCTGCATGAAGCCCTGCACAG |
| | | CCACTACACCCAGAAGTCCCTGTCTCTGAGCCCCGGCAAGTGATA |
| | | A (SEQ ID NO: 600) |
| | Hinge-CH2 (GAALIE)-CH3 | GAACCCAAGAGCTGCGACAAGACCCACACCTGTCCTCCATGTCCT |
| | (cah-LS) (G1m17) | GCTCCAGAACTGCTGGCCGGACCTTCCGTGTTCCTGTTTCCTCCA |
| | | AAGCCTAAGGACACCCTGATGATCAGCAGAACCCCTGAAGTGA |
| | | CCTGCGTGGTGGTGGATGTGTCTCACGAGGACCCTGAAGTGAA |
| | | GTTCAATTGGTACGTGGACGGCGTGGAAGTGCACAACGCCAAG |
| | | ACCAAGCCTAGAGAGGAACAGTACAACAGCACCTACAGAGTG |
| | | GTGTCCGTGCTGACCGTGCTGCACCAGGATTGGCTGAACGGCA |
| | | AAGAGTACAAGTGCAAGGTGTCCAACAAGGCCCTGCCTCTGCC |
| | | TGAGGAAAAGACCATCAGCAAGGCCAAGGGCCAGCCTCGCGAA |
| | | CCTCAAGTCTGTACACTGCCTCCTAGCCGCGAGGAAATGACCAAG |
| | | AACCAGGTGTCCCTGAGCTGCGCCGTGAAGGGCTTTTACCCTTCC |
| | | GATATCGCCGTGGAATGGGAGAGCAATGGCCAGCCTGAGAACA |
| | | ACTACAAGACAACCCCTCCTGTGCTGGACAGCGACGGCTCATTCT |
| | | TCCTGGTGTCCAAGCTGACAGTGGACAAGAGCAGATGGCAGCAG |
| | | GGCAACGTGTTCAGCTGCAGCGTGCTGCATGAAGCCCTGCACAG |
| | | CCACTACACCCAGAAGTCCCTGTCTCTGAGCCCCGGCAAGTGATA |
| | | A (SEQ ID NO: 601) |
| | Hinge-CH2 (GAIE)-CH3 | GAACCCAAGAGCTGCGACAAGACCCACACCTGTCCTCCATGTCCT |
| | (cah-LS) (G1m17) | GCTCCAGAACTGCTGGCCGGACCTTCCGTGTTCCTGTTTCCTCCA |
| | | AAGCCTAAGGACACCCTGATGATCAGCAGAACCCCTGAAGTGAC |
| | | CTGCGTGGTGGTGGATGTGTCTCACGAGGACCCTGAAGTGAAGT |
| | | TCAATTGGTACGTGGACGGCGTGGAAGTGCACAACGCCAAGACC |
| | | AAGCCTAGAGAGGAACAGTACAACAGCACCTACAGAGTGGTGT |
| | | CCGTGCTGACCGTGCTGCACCAGGATTGGCTGAACGGCAAAGA |
| | | GTACAAGTGCAAGGTGTCCAACAAGGCCCTGCCTGCCCCTGAGG |
| | | AAAAGACCATCAGCAAGGCCAAGGGCCAGCCTCGCGAACCTCAA |
| | | GTCTGTACACTGCCTCCTAGCCGCGAGGAAATGACCAAGAACCAG |
| | | GTGTCCCTGAGCTGCGCCGTGAAGGGCTTTTACCCTTCCGATATCG |
| | | CCGTGGAATGGGAGAGCAATGGCCAGCCTGAGAACAACTACAAG |
| | | ACAACCCCTCCTGTGCTGGACAGCGACGGCTCATTCTTCCTGGTGT |
| | | CCAAGCTGACAGTGGACAAGAGCAGATGGCAGCAGGGCAACGTG |
| | | TTCAGCTGCAGCGTGCTGCATGAAGCCCTGCACAGCCACTACACCC |
| | | AGAAGTCCCTGTCTCTGAGCCCCGGCAAGTGATAA |
| | | (SEQ ID NO: 602) |
| | Hinge-CH2 CH3 (cak-LS) | GAACCCAAGAGCTGCGACAAGACCCACACCTGTCCTCCATGTCCT |
| | (G1m17) | GCTCCAGAACTGCTCGGCGGACCTTCCGTGTTCCTGTTTCCTCCA |
| | | AAGCCTAAGGACACCCTGATGATCAGCAGAACCCCTGAAGTGA |
| | | CCTGCGTGGTGGTGGATGTGTCTCACGAGGACCCAGAAGTGAA |
| | | GTTCAATTGGTACGTGGACGGCGTGGAAGTGCACAACGCCAAG |
| | | ACCAAGCCTAGAGAGGAACAGTACAACAGCACCTACAGAGTG |
| | | GTGTCCGTGCTGACAGTGCTGCACCAGGATTGGCTGAACGGCA |
| | | AAGAGTACAAGTGCAAGGTGTCCAACAAGGCCCTGCCTGCTCC |
| | | TATCGAGAAAACCATCAGCAAGGCCAAGGGCCAGCCTAGGGAA |
| | | CCCCAGGTTTACACCCTGCCTCCATGCCGCGAGGAAATGACCAAG |
| | | AACCAGGTGTCCCTGTGGTGCCTGGTCAAGGGCTTCTACCCTTCC |
| | | GATATCGCCGTGGAATGGGAGAGCAATGGCCAGCCTGAGAACA |
| | | ACTACAAGACAACCCCTCCTGTGCTGGACAGCGACGGCTCATTCT |
| | | TCCTGTACAGCAAGCTGACAGTGGACAAGAGCAGATGGCAGCAG |
| | | GGCAACGTGTTCAGCTGCAGCGTGCTGCATGAAGCCCTGCACAG |
| | | CCACTACACCCAGAAGTCCCTGTCTCTGAGCCCCGGCAAGTGATA |
| | | A (SEQ ID NO: 603) |
| | Hinge-CH2 (GAALIE)-CH3 | GAACCCAAGAGCTGCGACAAGACCCACACCTGTCCTCCATGTCCT |
| | (cak-LS) (G1m17) | GCTCCAGAACTGCTGGCCGGACCTTCCGTGTTCCTGTTTCCTCCA |
| | | AAGCCTAAGGACACCCTGATGATCAGCAGAACCCCTGAAGTGA |
| | | CCTGCGTGGTGGTGGATGTGTCTCACGAGGACCCTGAAGTGAA |
| | | GTTCAATTGGTACGTGGACGGCGTGGAAGTGCACAACGCCAAG |
| | | ACCAAGCCTAGAGAGGAACAGTACAACAGCACCTACAGAGTG |
| | | GTGTCCGTGCTGACCGTGCTGCACCAGGATTGGCTGAACGGCA |
| | | AAGAGTACAAGTGCAAGGTGTCCAACAAGGCCCTGCCTCTGCC |
| | | TGAGGAAAAGACCATCAGCAAGGCCAAGGGCCAGCCTAGGGA |
| | | ACCCCAGGTTTACACCCTGCCTCCATGCCGCGAGGAAATGACCAA |
| | | GAACCAGGTGTCCCTGTGGTGCCTGGTCAAGGGCTTCTACCCTTC |
| | | CGATATCGCCGTGGAATGGGAGAGCAATGGCCAGCCTGAGAAC |
| | | AACTACAAGACAACCCCTCCTGTGCTGGACAGCGACGGCTCATTC |
| | | TTCCTGTACAGCAAGCTGACAGTGGACAAGAGCAGATGGCAGCA |
| | | GGGCAACGTGTTCAGCTGCAGCGTGCTGCATGAAGCCCTGCACA |
| | | GCCACTACACCCAGAAGTCCCTGTCTCTGAGCCCCGGCAAGTGAT |
| | | AA (SEQ ID NO: 604) |
| | Hinge-CH2 (GAIE)-CH3 | GAACCCAAGAGCTGCGACAAGACCCACACCTGTCCTCCATGTCCT |
| | (cak-LS) (G1m17) | GCTCCAGAACTGCTGGCCGGACCTTCCGTGTTCCTGTTTCCTCCA |
| | | AAGCCTAAGGACACCCTGATGATCAGCAGAACCCCTGAAGTGA |
| | | CCTGCGTGGTGGTGGATGTGTCTCACGAGGACCCTGAAGTGAA |
| | | GTTCAATTGGTACGTGGACGGCGTGGAAGTGCACAACGCCAAG |
| | | ACCAAGCCTAGAGAGGAACAGTACAACAGCACCTACAGAGTG |
| | | GTGTCCGTGCTGACCGTGCTGCACCAGGATTGGCTGAACGGCA |
| | | AAGAGTACAAGTGCAAGGTGTCCAACAAGGCCCTGCCTGCCCC |
| | | TGAGGAAAAGACCATCAGCAAGGCCAAGGGCCAGCCTAGGGA |
| | | ACCCCAGGTTTACACCCTGCCTCCATGCCGCGAGGAAATGACCAA |
| | | GAACCAGGTGTCCCTGTGGTGCCTGGTCAAGGGCTTCTACCCTTC |
| | | CGATATCGCCGTGGAATGGGAGAGCAATGGCCAGCCTGAGAAC |
| | | AACTACAAGACAACCCCTCCTGTGCTGGACAGCGACGGCTCATTC |
| | | TTCCTGTACAGCAAGCTGACAGTGGACAAGAGCAGATGGCAGCA |
| | | GGGCAACGTGTTCAGCTGCAGCGTGCTGCATGAAGCCCTGCACA |
| | | GCCACTACACCCAGAAGTCCCTGTCTCTGAGCCCCGGCAAGTGAT |
| | | AA (SEQ ID NO: 605) |
| | Hinge-CH2 CH3 (cah-LS) | GAACCCAAGAGCTGCGACAAGACCCACACCTGTCCTCCATGTCCT |
| | (G1m17,1) | GCTCCAGAACTGCTCGGCGGACCTTCCGTGTTCCTGTTTCCTCCA |
| | | AAGCCTAAGGACACCCTGATGATCAGCAGAACCCCTGAAGTGA |
| | | CCTGCGTGGTGGTGGATGTGTCTCACGAGGACCCAGAAGTGAA |
| | | GTTCAATTGGTACGTGGACGGCGTGGAAGTGCACAACGCCAAG |
| | | ACCAAGCCTAGAGAGGAACAGTACAACAGCACCTACAGAGTG |
| | | GTGTCCGTGCTGACAGTGCTGCACCAGGATTGGCTGAACGGCA |
| | | AAGAGTACAAGTGCAAGGTGTCCAACAAGGCCCTGCCTGCTCC |
| | | TATCGAGAAAACCATCAGCAAGGCCAAGGGCCAGCCTCGCGAA |
| | | CCTCAAGTCTGTACACTGCCTCCTAGCCGCGACGAACTGACCAAG |
| | | AACCAGGTGTCCCTGAGCTGCGCCGTGAAGGGCTTTTACCCTTCC |
| | | GATATCGCCGTGGAATGGGAGAGCAATGGCCAGCCTGAGAACA |
| | | ACTACAAGACAACCCCTCCTGTGCTGGACAGCGACGGCTCATTCT |
| | | TCCTGGTGTCCAAGCTGACAGTGGACAAGAGCAGATGGCAGCAG |
| | | GGCAACGTGTTCAGCTGCAGCGTGCTGCATGAAGCCCTGCACAG |
| | | CCACTACACCCAGAAGTCCCTGTCTCTGAGCCCCGGCAAGTGATA |
| | | A (SEQ ID NO: 606) |
| | Hinge-CH2 (GAALIE)-CH3 | GAACCCAAGAGCTGCGACAAGACCCACACCTGTCCTCCATGTCCT |
| | (cah-LS) (G1m17,1) | GCTCCAGAACTGCTGGCCGGACCTTCCGTGTTCCTGTTTCCTCCA |
| | | AAGCCTAAGGACACCCTGATGATCAGCAGAACCCCTGAAGTGA |
| | | CCTGCGTGGTGGTGGATGTGTCTCACGAGGACCCTGAAGTGAA |
| | | GTTCAATTGGTACGTGGACGGCGTGGAAGTGCACAACGCCAAG |
| | | ACCAAGCCTAGAGAGGAACAGTACAACAGCACCTACAGAGTG |
| | | GTGTCCGTGCTGACCGTGCTGCACCAGGATTGGCTGAACGGCA |
| | | AAGAGTACAAGTGCAAGGTGTCCAACAAGGCCCTGCCTCTGCC |
| | | TGAGGAAAAGACCATCAGCAAGGCCAAGGGCCAGCCTCGCGAA |
| | | CCTCAAGTCTGTACACTGCCTCCTAGCCGCGACGAACTGACCAAG |
| | | AACCAGGTGTCCCTGAGCTGCGCCGTGAAGGGCTTTTACCCTTCC |
| | | GATATCGCCGTGGAATGGGAGAGCAATGGCCAGCCTGAGAACA |
| | | ACTACAAGACAACCCCTCCTGTGCTGGACAGCGACGGCTCATTCT |
| | | TCCTGGTGTCCAAGCTGACAGTGGACAAGAGCAGATGGCAGCAG |
| | | GGCAACGTGTTCAGCTGCAGCGTGCTGCATGAAGCCCTGCACAG |
| | | CCACTACACCCAGAAGTCCCTGTCTCTGAGCCCCGGCAAGTGATA |
| | | A (SEQ ID NO: 607) |
| | Hinge-CH2 (GAIE)-CH3 | GAACCCAAGAGCTGCGACAAGACCCACACCTGTCCTCCATGTCCT |
| | (cah-LS) (G1m17,1) | GCTCCAGAACTGCTGGCCGGACCTTCCGTGTTCCTGTTTCCTCCA |
| | | AAGCCTAAGGACACCCTGATGATCAGCAGAACCCCTGAAGTGA |
| | | CCTGCGTGGTGGTGGATGTGTCTCACGAGGACCCTGAAGTGAA |
| | | GTTCAATTGGTACGTGGACGGCGTGGAAGTGCACAACGCCAAG |
| | | ACCAAGCCTAGAGAGGAACAGTACAACAGCACCTACAGAGTG |
| | | GTGTCCGTGCTGACCGTGCTGCACCAGGATTGGCTGAACGGCA |
| | | AAGAGTACAAGTGCAAGGTGTCCAACAAGGCCCTGCCTGCCCC |
| | | TGAGGAAAAGACCATCAGCAAGGCCAAGGGCCAGCCTCGCGAA |
| | | CCTCAAGTCTGTACACTGCCTCCTAGCCGCGACGAACTGACCAAG |
| | | AACCAGGTGTCCCTGAGCTGCGCCGTGAAGGGCTTTTACCCTTCC |
| | | GATATCGCCGTGGAATGGGAGAGCAATGGCCAGCCTGAGAACA |
| | | ACTACAAGACAACCCCTCCTGTGCTGGACAGCGACGGCTCATTCT |
| | | TCCTGGTGTCCAAGCTGACAGTGGACAAGAGCAGATGGCAGCAG |
| | | GGCAACGTGTTCAGCTGCAGCGTGCTGCATGAAGCCCTGCACAG |
| | | CCACTACACCCAGAAGTCCCTGTCTCTGAGCCCCGGCAAGTGATA |
| | | A (SEQ ID NO: 608) |
| | Hinge-CH2 CH3 (cak-LS) | GAACCCAAGAGCTGCGACAAGACCCACACCTGTCCTCCATGTCCT |
| | (G1m17, 1) | GCTCCAGAACTGCTCGGCGGACCTTCCGTGTTCCTGTTTCCTCCA |
| | | AAGCCTAAGGACACCCTGATGATCAGCAGAACCCCTGAAGTGA |
| | | CCTGCGTGGTGGTGGATGTGTCTCACGAGGACCCAGAAGTGAA |
| | | GTTCAATTGGTACGTGGACGGCGTGGAAGTGCACAACGCCAAG |
| | | ACCAAGCCTAGAGAGGAACAGTACAACAGCACCTACAGAGTG |
| | | GTGTCCGTGCTGACAGTGCTGCACCAGGATTGGCTGAACGGCA |
| | | AAGAGTACAAGTGCAAGGTGTCCAACAAGGCCCTGCCTGCTCC |
| | | TATCGAGAAAACCATCAGCAAGGCCAAGGGCCAGCCTAGGGAA |
| | | CCCCAGGTTTACACCCTGCCTCCATGCCGCGACGAACTGACCAAG |
| | | AACCAGGTGTCCCTGTGGTGCCTGGTCAAGGGCTTCTACCCTTCC |
| | | GATATCGCCGTGGAATGGGAGAGCAATGGCCAGCCTGAGAACA |
| | | ACTACAAGACAACCCCTCCTGTGCTGGACAGCGACGGCTCATTCT |
| | | TCCTGTACAGCAAGCTGACAGTGGACAAGAGCAGATGGCAGCAG |
| | | GGCAACGTGTTCAGCTGCAGCGTGCTGCATGAAGCCCTGCACAG |
| | | CCACTACACCCAGAAGTCCCTGTCTCTGAGCCCCGGCAAGTGATA |
| | | A (SEQ ID NO: 609) |
| | Hinge-CH2 (GAALIE)-CH3 | GAACCCAAGAGCTGCGACAAGACCCACACCTGTCCTCCATGTCCT |
| | (cak-LS) (G1m17, 1) | GCTCCAGAACTGCTGGCCGGACCTTCCGTGTTCCTGTTTCCTCCA |
| | | AAGCCTAAGGACACCCTGATGATCAGCAGAACCCCTGAAGTGA |
| | | CCTGCGTGGTGGTGGATGTGTCTCACGAGGACCCTGAAGTGAA |
| | | GTTCAATTGGTACGTGGACGGCGTGGAAGTGCACAACGCCAAG |
| | | ACCAAGCCTAGAGAGGAACAGTACAACAGCACCTACAGAGTG |
| | | GTGTCCGTGCTGACCGTGCTGCACCAGGATTGGCTGAACGGCA |
| | | AAGAGTACAAGTGCAAGGTGTCCAACAAGGCCCTGCCTCTGCC |
| | | TGAGGAAAAGACCATCAGCAAGGCCAAGGGCCAGCCTAGGGA |
| | | ACCCCAGGTTTACACCCTGCCTCCATGCCGCGACGAACTGACCAA |
| | | GAACCAGGTGTCCCTGTGGTGCCTGGTCAAGGGCTTCTACCCTTC |
| | | CGATATCGCCGTGGAATGGGAGAGCAATGGCCAGCCTGAGAAC |
| | | AACTACAAGACAACCCCTCCTGTGCTGGACAGCGACGGCTCATTC |
| | | TTCCTGTACAGCAAGCTGACAGTGGACAAGAGCAGATGGCAGCA |
| | | GGGCAACGTGTTCAGCTGCAGCGTGCTGCATGAAGCCCTGCACA |
| | | GCCACTACACCCAGAAGTCCCTGTCTCTGAGCCCCGGCAAGTGAT |
| | | AA (SEQ ID NO: 610) |
| | Hinge-CH2 (GAIE)-CH3 | GAACCCAAGAGCTGCGACAAGACCCACACCTGTCCTCCATGTCCT |
| | (cak-LS) (G1m17, 1) | GCTCCAGAACTGCTGGCCGGACCTTCCGTGTTCCTGTTTCCTCCA |
| | | AAGCCTAAGGACACCCTGATGATCAGCAGAACCCCTGAAGTGA |
| | | CCTGCGTGGTGGTGGATGTGTCTCACGAGGACCCTGAAGTGAA |
| | | GTTCAATTGGTACGTGGACGGCGTGGAAGTGCACAACGCCAAG |
| | | ACCAAGCCTAGAGAGGAACAGTACAACAGCACCTACAGAGTG |
| | | GTGTCCGTGCTGACCGTGCTGCACCAGGATTGGCTGAACGGCA |
| | | AAGAGTACAAGTGCAAGGTGTCCAACAAGGCCCTGCCTGCCCC |
| | | TGAGGAAAAGACCATCAGCAAGGCCAAGGGCCAGCCTAGGGA |
| | | ACCCCAGGTTTACACCCTGCCTCCATGCCGCGACGAACTGACCAA |
| | | GAACCAGGTGTCCCTGTGGTGCCTGGTCAAGGGCTTCTACCCTTC |
| | | CGATATCGCCGTGGAATGGGAGAGCAATGGCCAGCCTGAGAAC |
| | | AACTACAAGACAACCCCTCCTGTGCTGGACAGCGACGGCTCATTC |
| | | TTCCTGTACAGCAAGCTGACAGTGGACAAGAGCAGATGGCAGCA |
| | | GGGCAACGTGTTCAGCTGCAGCGTGCTGCATGAAGCCCTGCACA |
| | | GCCACTACACCCAGAAGTCCCTGTCTCTGAGCCCCGGCAAGTGAT |
| | | AA (SEQ ID NO: 611) |

### Example 12: In Vivo Validation of Parental and Mutated 1-18 (IgGI and scFv-Fc) RibobNAbs

[1267] Generation of polyribonucleotides encoding for 1-18 antibody agents as described herein allows the 1-18 agents to be delivered in combination with other polyribonucleotides that encode additional anti-HIV antibody agents. Use of the technologies and approaches described herein also allows for simultaneous production of different antibody agents from polyribonucleotides. The formats of antibody agents have been designed to minimize or eliminate the risk of immunoglobulin chain mispairing. Being able to combine multiple antibody agent formulations as described herein (e.g., including an 1-18 antibody agent) allows for the development of a composition (e.g., a pharmaceutical composition) that delivers multiple antibody agents together so that they can bind different epitopes of the HIV virus, thereby minimizing viral escape through mutations.

[1268] The present Example shows that polyribonucleotides encoding 1-18 antibody agents can induce production of 1-18 L/S scFv-Fc (comprising an amino acid sequence represented in SEQ ID NO: 665, and the ribopolynucleotide construct sequence SEQ ID NO: 471) and 1-18 IgG IgG (comprising amino acid sequences represented in SEQ ID NOs: 614 and 620, and the ribopolynucleotide construct sequences SEQ ID NOs: 454 and 458) and 1-18 L/S IgG (comprising amino acid sequences represented in SEQ ID NOs: 617 and 620, and the ribopolynucleotide construct sequences SEQ ID NOs: 455 and 458) antibody agents in vivo. Furthermore, the present Example shows that polyribonucleotides encoding 1-18 antibody agents can drive a high antibody titer in the serum of test subjects over a period of time. The example shows a direct comparison of the PK profile of 1-18 L/S scFv-Fc with 1-18 L/S IgG. A mutation (“L/S”) was introduced in the CH3 domain of certain antibody agents to improve binding to the FcRn receptor and thereby improve the terminal kinetic and increase the half-life of the antibody agent (see, for example, Zalevsky et al., 2010, Nature biotechnology). In this Example, the pharmacokinetic properties of 1-18, 1-18 L/S IgG and 1-18 L/S scFv-Fc agents were evaluated to assess the mutation's effect on such antibody qualities. NSG hFcRn TG32 mice were used, where the murine FcRn receptor has been exchanged to the human version.

[1269] The concentration of the 1-18 IgG antibody and the L/S mutated 1-18 IgG and scFv-Fc antibody was analyzed in serum of NSG hFcRn Tg32 mice.

[1270] NSG hFcRn TG32 mice were injected intravenously with LNP-encapsulated polyribonucleotides encoding 1-18 L/S scFv-Fc (1 Chain), 1-18 IgG and 1-18 L/S IgG antibody agents (1.5:1 HC/LC) in 150 μL of PBS. Blood was sampled from the mice at various time points, and serum was analyzed for the abundance of the RibobNAbs over a time period of 33 days with Gyros ELISA, as described herein.

### Results

[1271] The results are presented in FIG. 19 in log scale. The 1-18 scFv-Fc and IgG variants were all successfully produced in vivo. Both the 1-18 L/S scFv-Fc and 1-18 L/S IgG antibody agents were expressed in vivo in a dose-dependent manner. The scFv-Fc variant has a lower Cmax compared to the IgG variants (˜100 μg/ml vs ˜1000 μg/ml). Furthermore, the 1-18 L/S IgG (10 μg Dose) antibody agent displayed improved pharmacokinetics as compared to the 1-18 IgG (10 μg Dose) antibody agent, confirming that the L/S mutation can indeed extend antibody half-life.

The application's sequence listing, which the Patent Office published only in electronic form, follows.

SEQUENCE LISTING (891 sequences)

SEQ ID NO: 1 - protein, 19 aa, synthetic construct
MDWIWRILFLVGAATGAHS

SEQ ID NO: 2 - RNA, 57 nt, synthetic construct
  source 1..57: mol_type = other RNA
atggattggatttggagaatcctgttcctcgtgggcgccgctaccggagcccactcc

SEQ ID NO: 3 - DNA, 57 bp, synthetic construct
  source 1..57: mol_type = other DNA
atggattggatttggagaatcctgttcctcgtgggcgccgctaccggagcccactcc

SEQ ID NO: 4 - RNA, 57 nt, synthetic construct
  source 1..57: mol_type = other RNA
atggactggatctggcgcatcctgtttcttgtgggagccgccacaggcgcccattct

SEQ ID NO: 5 - DNA, 57 bp, synthetic construct
  source 1..57: mol_type = other DNA
atggactggatctggcgcatcctgtttcttgtgggagccgccacaggcgcccattct

SEQ ID NO: 6 - protein, 14 aa, synthetic construct
DDPYTDDDTFTKYW

SEQ ID NO: 7 - RNA, 42 nt, synthetic construct
  source 1..42: mol_type = other RNA
gacgacccctacaccgacgacgataccttcaccaagtactgg

SEQ ID NO: 8 - DNA, 42 bp, synthetic construct
  source 1..42: mol_type = other DNA
gacgacccctacaccgacgacgataccttcaccaagtactgg

SEQ ID NO: 9 - protein, 8 aa, synthetic construct
ISPHFARP

SEQ ID NO: 10 - RNA, 24 nt, synthetic construct
  source 1..24: mol_type = other RNA
atcagccctcacttcgccagacct

SEQ ID NO: 11 - DNA, 24 bp, synthetic construct
  source 1..24: mol_type = other DNA
atcagccctcacttcgccagacct

SEQ ID NO: 12 - protein, 18 aa, synthetic construct
ARDPFGDRAPHYNYHMDV

SEQ ID NO: 13 - RNA, 54 nt, synthetic construct
  source 1..54: mol_type = other RNA
gccagagatcccttcggcgacagagcccctcactacaactaccacatggacgtg

SEQ ID NO: 14 - DNA, 54 bp, synthetic construct
  source 1..54: mol_type = other DNA
gccagagatcccttcggcgacagagcccctcactacaactaccacatggacgtg

SEQ ID NO: 15 - protein, 7 aa, synthetic construct
QGLDSSH

SEQ ID NO: 16 - RNA, 21 nt, synthetic construct
  source 1..21: mol_type = other RNA
cagggcctcgattcttctcac

SEQ ID NO: 17 - DNA, 21 bp, synthetic construct
  source 1..21: mol_type = other DNA
cagggcctcgattcttctcac

SEQ ID NO: 18-20 - skipped (3 entries)

SEQ ID NO: 21 - protein, 9 aa, synthetic construct
QRYGGTPIT

SEQ ID NO: 22 - RNA, 27 nt, synthetic construct
  source 1..27: mol_type = other RNA
cagagatacggcggcacccctatcaca

SEQ ID NO: 23 - DNA, 27 bp, synthetic construct
  source 1..27: mol_type = other DNA
cagagatacggcggcacccctatcaca

SEQ ID NO: 24 - protein, 131 aa, synthetic construct
QGRLFQSGAEVKRPGASVRISCRADDDPYTDDDTFTKYWTHWIRQAPGQRPEWLGVISPHFARPIYSYKFRDRLTLTRDSSLTAVYLELKGLQPDDSGIYFCARDPFGDRAPHYNYHMDVWGGGTAVIVSS

SEQ ID NO: 25 - RNA, 393 nt, synthetic construct
  source 1..393: mol_type = other RNA
cagggcagactgtttcagtctggcgccgaagtgaaaagaccaggcgcctctgtgcggatcagctgcagagctgacgacgacccctacaccgacgacgataccttcaccaagtactggacccactggatcagacaggcccctggacaaagacctgagtggctgggagtgatcagccctcacttcgccagacctatctacagctacaagttccgggacagactgaccctgaccagagacagctctctgaccgccgtgtacctggaactgaagggcctgcagcctgacgacagcggcatctacttttgcgccagagatcccttcggcgacagagcccctcactacaactaccacatggacgtgtggggcggaggcacagccgtgatagttagcagc

SEQ ID NO: 26 - DNA, 393 bp, synthetic construct
  source 1..393: mol_type = other DNA
cagggcagactgtttcagtctggcgccgaagtgaaaagaccaggcgcctctgtgcggatcagctgcagagctgacgacgacccctacaccgacgacgataccttcaccaagtactggacccactggatcagacaggcccctggacaaagacctgagtggctgggagtgatcagccctcacttcgccagacctatctacagctacaagttccgggacagactgaccctgaccagagacagctctctgaccgccgtgtacctggaactgaagggcctgcagcctgacgacagcggcatctacttttgcgccagagatcccttcggcgacagagcccctcactacaactaccacatggacgtgtggggcggaggcacagccgtgatagttagcagc

SEQ ID NO: 27 - RNA, 393 nt, synthetic construct
  source 1..393: mol_type = other RNA
cagggcagactgtttcagtctggcgccgaagtgaaaagaccaggcgcctctgtgcggatcagctgcagagctgacgacgacccctacaccgacgacgataccttcaccaagtactggacccactggatcagacaggcccctggacaaagacctgagtggctgggagtgatcagccctcacttcgccagacctatctacagctacaagttccgggacagactgaccctgaccagagacagctctctgaccgccgtgtacctggaactgaagggcctgcagcctgacgacagcggcatctacttttgcgccagagatcccttcggcgacagagcccctcactacaactaccacatggacgtgtggggcggaggcacagccgtgatcgtttctagc

SEQ ID NO: 28 - DNA, 393 bp, synthetic construct
  source 1..393: mol_type = other DNA
cagggcagactgtttcagtctggcgccgaagtgaaaagaccaggcgcctctgtgcggatcagctgcagagctgacgacgacccctacaccgacgacgataccttcaccaagtactggacccactggatcagacaggcccctggacaaagacctgagtggctgggagtgatcagccctcacttcgccagacctatctacagctacaagttccgggacagactgaccctgaccagagacagctctctgaccgccgtgtacctggaactgaagggcctgcagcctgacgacagcggcatctacttttgcgccagagatcccttcggcgacagagcccctcactacaactaccacatggacgtgtggggcggaggcacagccgtgatcgtttctagc

SEQ ID NO: 29 - protein, 108 aa, synthetic construct
EVVLTQSPAILSVSPGDRVILSCRASQGLDSSHLAWYRFKRGQIPTLVIFGTSNRARGTPDRFSGSGSGADFTLTISRVEPEDFATYYCQRYGGTPITFGGGTTLDKK

SEQ ID NO: 30 - RNA, 324 nt, synthetic construct
  source 1..324: mol_type = other RNA
gaagttgtgctgacacagagccccgccatcctgagtgttagccctggcgatagagtgatcctgagctgcagagcctctcagggcctcgattcttctcacctggcctggtacagattcaagcggggacagatccccacactggtcatcttcggcaccagcaacagagccagaggcacccctgatagattttccggctctggcagcggagccgacttcaccctgacaatcagcagagtggaacccgaggacttcgccacctactactgccagagatacggcggcacccctatcacatttggcggcggaaccacactggacaagaaa

SEQ ID NO: 31 - DNA, 324 bp, synthetic construct
  source 1..324: mol_type = other DNA
gaagttgtgctgacacagagccccgccatcctgagtgttagccctggcgatagagtgatcctgagctgcagagcctctcagggcctcgattcttctcacctggcctggtacagattcaagcggggacagatccccacactggtcatcttcggcaccagcaacagagccagaggcacccctgatagattttccggctctggcagcggagccgacttcaccctgacaatcagcagagtggaacccgaggacttcgccacctactactgccagagatacggcggcacccctatcacatttggcggcggaaccacactggacaagaaa

SEQ ID NO: 32 - protein, 20 aa, synthetic construct
GGGGSGGGGSGGGGSGGGGS

SEQ ID NO: 33 - RNA, 60 nt, synthetic construct
  source 1..60: mol_type = other RNA
ggtggcggaggaagcggaggcggaggttcaggcggcggaggctctggcggtggtggatct

SEQ ID NO: 34 - DNA, 60 bp, synthetic construct
  source 1..60: mol_type = other DNA
ggtggcggaggaagcggaggcggaggttcaggcggcggaggctctggcggtggtggatct

SEQ ID NO: 35 - protein, 25 aa, synthetic construct
GGGGSGGGGSGGGGSGGGGSGGGGS

SEQ ID NO: 36 - RNA, 75 nt, synthetic construct
  source 1..75: mol_type = other RNA
ggcggcggaggaagcggaggcgggggttctggcggtggtggctctggtggcggaggctcaggcggtggcggatct

SEQ ID NO: 37 - DNA, 75 bp, synthetic construct
  source 1..75: mol_type = other DNA
ggcggcggaggaagcggaggcgggggttctggcggtggtggctctggtggcggaggctcaggcggtggcggatct

SEQ ID NO: 38 - protein, 98 aa, synthetic construct
ASTKGPSVFPLAPSSKSTSGGTAALGCLVKDYFPEPVTVSWNSGALTSGVHTFPAVLQSSGLYSLSSVVTVPSSSLGTQTYICNVNHKPSNTKVDKRV

SEQ ID NO: 39 - RNA, 294 nt, synthetic construct
  source 1..294: mol_type = other RNA
gcctctacaaagggccctagcgtgttccctctggctcctagcagcaagtcgacatctggcggaacagccgctctgggctgtctggtcaaggactactttcccgagcctgtgacagtgtcctggaactctggcgctctgacaagcggcgtgcacacatttccagccgtgctgcaaagcagcggcctgtactctctgagcagcgtggtcacagtgccaagctctagcctgggcacccagacctacatctgcaatgtgaaccacaagcctagcaacaccaaggtggacaagagagtg

SEQ ID NO: 40 - DNA, 294 bp, synthetic construct
  source 1..294: mol_type = other DNA
gcctctacaaagggccctagcgtgttccctctggctcctagcagcaagtcgacatctggcggaacagccgctctgggctgtctggtcaaggactactttcccgagcctgtgacagtgtcctggaactctggcgctctgacaagcggcgtgcacacatttccagccgtgctgcaaagcagcggcctgtactctctgagcagcgtggtcacagtgccaagctctagcctgggcacccagacctacatctgcaatgtgaaccacaagcctagcaacaccaaggtggacaagagagtg

SEQ ID NO: 41 - protein, 98 aa, synthetic construct
ASTKGPSVFPLAPSSKSTSGGTAALGCLVKDYFPEPVTVSWNSGALTSGVHTFPAVLQSSGLYSLSSVVTVPSSSLGTQTYICNVNHKPSNTKVDKKV

SEQ ID NO: 42 - RNA, 294 nt, synthetic construct
  source 1..294: mol_type = other RNA
gcctctacaaagggccctagcgtgttccctctggctcctagcagcaagtcgacatctggcggaacagccgctctgggctgtctggtcaaggactactttcccgagcctgtgacagtgtcctggaactctggcgctctgacaagcggcgtgcacacatttccagccgtgctgcaaagcagcggcctgtactctctgagcagcgtggtcacagtgccaagctctagcctgggcacccagacctacatctgcaatgtgaaccacaagcctagcaacaccaaggtggacaagaaggtg

SEQ ID NO: 43 - DNA, 294 bp, synthetic construct
  source 1..294: mol_type = other DNA
gcctctacaaagggccctagcgtgttccctctggctcctagcagcaagtcgacatctggcggaacagccgctctgggctgtctggtcaaggactactttcccgagcctgtgacagtgtcctggaactctggcgctctgacaagcggcgtgcacacatttccagccgtgctgcaaagcagcggcctgtactctctgagcagcgtggtcacagtgccaagctctagcctgggcacccagacctacatctgcaatgtgaaccacaagcctagcaacaccaaggtggacaagaaggtg

SEQ ID NO: 44 - protein, 105 aa, synthetic construct
SSASTKGPSVFPLAPSSKSTSGGTAALGCLVKDYFPEPVTVSWNSGALTSGVHTFPAVLQSSGLYSLSSVVTVPSSSLGTQTYICNVNHKPSNTKVDKRVEPKSC

SEQ ID NO: 45 - RNA, 321 nt, synthetic construct
  source 1..321: mol_type = other RNA
agcagcgcctctacaaagggccccagcgttttcccactggctcctagcagcaagagcacatctggcggaacagccgctctgggctgtctggtcaaggactactttcccgagcctgtgaccgtgtcctggaattctggcgctctgacatccggcgtgcacacctttccagctgtgctgcaaagcagcggcctgtactctctgagcagcgtggtcacagtgccaagctctagcctgggcacccagacctacatctgcaatgtgaaccacaagcctagcaacacgaaggtcgacaagagagtggaacccaagtcctgctgataa

SEQ ID NO: 46 - DNA, 321 bp, synthetic construct
  source 1..321: mol_type = other DNA
agcagcgcctctacaaagggccccagcgttttcccactggctcctagcagcaagagcacatctggcggaacagccgctctgggctgtctggtcaaggactactttcccgagcctgtgaccgtgtcctggaattctggcgctctgacatccggcgtgcacacctttccagctgtgctgcaaagcagcggcctgtactctctgagcagcgtggtcacagtgccaagctctagcctgggcacccagacctacatctgcaatgtgaaccacaagcctagcaacacgaaggtcgacaagagagtggaacccaagtcctgctgataa

SEQ ID NO: 47 - protein, 105 aa, synthetic construct
SSASTKGPSVFPLAPSSKSTSGGTAALGCLVKDYFPEPVTVSWNSGALTSGVHTFPAVLQSSGLYSLSSVVTVPSSSLGTQTYICNVNHKPSNTKVDKKVEPKSC

SEQ ID NO: 48 - RNA, 321 nt, synthetic construct
  source 1..321: mol_type = other RNA
agcagcgcctctacaaagggccccagcgttttcccactggctcctagcagcaagagcacatctggcggaacagccgctctgggctgtctggtcaaggactactttcccgagcctgtgaccgtgtcctggaattctggcgctctgacatccggcgtgcacacctttccagctgtgctgcaaagcagcggcctgtactctctgagcagcgtggtcacagtgccaagctctagcctgggcacccagacctacatctgcaatgtgaaccacaagcctagcaacacgaaggtcgacaagaaggtggaacccaagtcctgctgataa

SEQ ID NO: 49 - DNA, 321 bp, synthetic construct
  source 1..321: mol_type = other DNA
agcagcgcctctacaaagggccccagcgttttcccactggctcctagcagcaagagcacatctggcggaacagccgctctgggctgtctggtcaaggactactttcccgagcctgtgaccgtgtcctggaattctggcgctctgacatccggcgtgcacacctttccagctgtgctgcaaagcagcggcctgtactctctgagcagcgtggtcacagtgccaagctctagcctgggcacccagacctacatctgcaatgtgaaccacaagcctagcaacacgaaggtcgacaagaaggtggaacccaagtcctgctgataa

SEQ ID NO: 50 - protein, 98 aa, synthetic construct
ASTKGPSVFPLAPSSKSTSGGTAALGCLVEDYFPEPVTVSWNSGALTSGVHTFPAVLQSSGLYSLSSVVTVPSSSLGTQTYICNVNHKPSNTKVDDRV

SEQ ID NO: 51 - RNA, 294 nt, synthetic construct
  source 1..294: mol_type = other RNA
gcttccacaaagggccctagcgtgttccctctggctcctagcagcaagtctacaagcggaggaacagctgccctgggctgcctggtggaagattactttcctgagcctgtgaccgtgtcctggaacagcggtgctctgacttctggcgtgcacacctttccagccgtgctgcaaagcagcggcctgtactctctgagcagcgtggtcacagtgccaagctctagcctgggcacccagacctacatctgcaatgtgaaccacaagcctagcaacaccaaggtggacgacagagtg

SEQ ID NO: 52 - DNA, 294 bp, synthetic construct
  source 1..294: mol_type = other DNA
gcttccacaaagggccctagcgtgttccctctggctcctagcagcaagtctacaagcggaggaacagctgccctgggctgcctggtggaagattactttcctgagcctgtgaccgtgtcctggaacagcggtgctctgacttctggcgtgcacacctttccagccgtgctgcaaagcagcggcctgtactctctgagcagcgtggtcacagtgccaagctctagcctgggcacccagacctacatctgcaatgtgaaccacaagcctagcaacaccaaggtggacgacagagtg

SEQ ID NO: 53 - protein, 110 aa, synthetic construct
APELLGGPSVFLFPPKPKDTLMISRTPEVTCVVVDVSHEDPEVKFNWYVDGVEVHNAKTKPREEQYNSTYRVVSVLTVLHQDWLNGKEYKCKVSNKALPAPIEKTISKAK

SEQ ID NO: 54 - RNA, 330 nt, synthetic construct
  source 1..330: mol_type = other RNA
gctccagaactgctcggcggaccttccgtgttcctgtttcctccaaagcctaaggacaccctgatgatcagcagaacccctgaagtgacctgcgtggtggtggatgtgtctcacgaggacccagaagtgaagttcaattggtacgtggacggcgtggaagtgcacaacgccaagaccaagcctagagaggaacagtacaacagcacctacagagtggtgtccgtgctgacagtgctgcaccaggattggctgaacggcaaagagtacaagtgcaaggtgtccaacaaggccctgcctgctcctatcgagaaaaccatcagcaaggccaag

SEQ ID NO: 55 - DNA, 330 bp, synthetic construct
  source 1..330: mol_type = other DNA
gctccagaactgctcggcggaccttccgtgttcctgtttcctccaaagcctaaggacaccctgatgatcagcagaacccctgaagtgacctgcgtggtggtggatgtgtctcacgaggacccagaagtgaagttcaattggtacgtggacggcgtggaagtgcacaacgccaagaccaagcctagagaggaacagtacaacagcacctacagagtggtgtccgtgctgacagtgctgcaccaggattggctgaacggcaaagagtacaagtgcaaggtgtccaacaaggccctgcctgctcctatcgagaaaaccatcagcaaggccaag

SEQ ID NO: 56 - protein, 108 aa, synthetic construct
APELLAGPSVFLFPPKPKDTLMISRTPEVTCVVVDVSHEDPEVKFNWYVDGVEVHNAKTKPREEQYNSTYRVVSVLTVLHQDWLNGKEYKCKVSNKALPLPEEKTISK

SEQ ID NO: 57 - RNA, 330 nt, synthetic construct
  source 1..330: mol_type = other RNA
gctccagaactgctggccggaccttccgtgttcctgtttcctccaaagcctaaggacaccctgatgatcagcagaacccctgaagtgacctgcgtggtggtggatgtgtctcacgaggaccctgaagtgaagttcaattggtacgtggacggcgtggaagtgcacaacgccaagaccaagcctagagaggaacagtacaacagcacctacagagtggtgtccgtgctgaccgtgctgcaccaggattggctgaacggcaaagagtacaagtgcaaggtgtccaacaaggccctgcctctgcctgaggaaaagaccatcagcaaggccaag

SEQ ID NO: 58 - DNA, 330 bp, synthetic construct
  source 1..330: mol_type = other DNA
gctccagaactgctggccggaccttccgtgttcctgtttcctccaaagcctaaggacaccctgatgatcagcagaacccctgaagtgacctgcgtggtggtggatgtgtctcacgaggaccctgaagtgaagttcaattggtacgtggacggcgtggaagtgcacaacgccaagaccaagcctagagaggaacagtacaacagcacctacagagtggtgtccgtgctgaccgtgctgcaccaggattggctgaacggcaaagagtacaagtgcaaggtgtccaacaaggccctgcctctgcctgaggaaaagaccatcagcaaggccaag

SEQ ID NO: 59 - protein, 110 aa, synthetic construct
APELLAGPSVFLFPPKPKDTLMISRTPEVTCVVVDVSHEDPEVKFNWYVDGVEVHNAKTKPREEQYNSTYRVVSVLTVLHQDWLNGKEYKCKVSNKALPAPEEKTISKAK

SEQ ID NO: 60 - RNA, 330 nt, synthetic construct
  source 1..330: mol_type = other RNA
gctccagaactgctggccggaccttccgtgttcctgtttcctccaaagcctaaggacaccctgatgatcagcagaacccctgaagtgacctgcgtggtggtggatgtgtctcacgaggaccctgaagtgaagttcaattggtacgtggacggcgtggaagtgcacaacgccaagaccaagcctagagaggaacagtacaacagcacctacagagtggtgtccgtgctgaccgtgctgcaccaggattggctgaacggcaaagagtacaagtgcaaggtgtccaacaaggccctgcctgcccctgaggaaaagaccatcagcaaggccaag

SEQ ID NO: 61 - DNA, 330 bp, synthetic construct
  source 1..330: mol_type = other DNA
gctccagaactgctggccggaccttccgtgttcctgtttcctccaaagcctaaggacaccctgatgatcagcagaacccctgaagtgacctgcgtggtggtggatgtgtctcacgaggaccctgaagtgaagttcaattggtacgtggacggcgtggaagtgcacaacgccaagaccaagcctagagaggaacagtacaacagcacctacagagtggtgtccgtgctgaccgtgctgcaccaggattggctgaacggcaaagagtacaagtgcaaggtgtccaacaaggccctgcctgcccctgaggaaaagaccatcagcaaggccaag

SEQ ID NO: 62 - protein, 108 aa, synthetic construct
APELLAGPSVFLFPPKPKDTLMISRTPEVTCVVVDVSHEDPEVKFNWYVDGVEVHNAKTKPREEQYNSTYRVVSVLTVLHQDWLNGKEYKCKVSNKALPAPIEKTISK

SEQ ID NO: 63 - RNA, 330 nt, synthetic construct
  source 1..330: mol_type = other RNA
gctccagaactgctggccggaccttccgtgttcctgtttcctccaaagcctaaggacaccctgatgatcagcagaacccctgaagtgacctgcgtggtggtggatgtgtctcacgaggaccctgaagtgaagttcaattggtacgtggacggcgtggaagtgcacaacgccaagaccaagcctagagaggaacagtacaacagcacctacagagtggtgtccgtgctgaccgtgctgcaccaggattggctgaacggcaaagagtacaagtgcaaggtgtccaacaaggccctgcctgcccctatcgaaaagaccatcagcaaggccaag

SEQ ID NO: 64 - DNA, 330 bp, synthetic construct
  source 1..330: mol_type = other DNA
gctccagaactgctggccggaccttccgtgttcctgtttcctccaaagcctaaggacaccctgatgatcagcagaacccctgaagtgacctgcgtggtggtggatgtgtctcacgaggaccctgaagtgaagttcaattggtacgtggacggcgtggaagtgcacaacgccaagaccaagcctagagaggaacagtacaacagcacctacagagtggtgtccgtgctgaccgtgctgcaccaggattggctgaacggcaaagagtacaagtgcaaggtgtccaacaaggccctgcctgcccctatcgaaaagaccatcagcaaggccaag

SEQ ID NO: 65 - protein, 108 aa, synthetic construct
APELLGGPSVFLFPPKPKDTLMISRTPEVTCVVVDVSHEDPEVKFNWYVDGVEVHNAKTKPREEQYNSTYRVVSVLTVLHQDWLNGKEYKCKVSNKALPAPEEKTISK

SEQ ID NO: 66 - RNA, 330 nt, synthetic construct
  source 1..330: mol_type = other RNA
gctccagaactgctgggcggaccttccgtgttcctgtttcctccaaagcctaaggacaccctgatgatcagcagaacccctgaagtgacctgcgtggtggtggatgtgtctcacgaggaccctgaagtgaagttcaattggtacgtggacggcgtggaagtgcacaacgccaagaccaagcctagagaggaacagtacaacagcacctacagagtggtgtccgtgctgaccgtgctgcaccaggattggctgaacggcaaagagtacaagtgcaaggtgtccaacaaggccctgcctgcccctgaggaaaagaccatcagcaaggccaag

SEQ ID NO: 67 - DNA, 330 bp, synthetic construct
  source 1..330: mol_type = other DNA
gctccagaactgctgggcggaccttccgtgttcctgtttcctccaaagcctaaggacaccctgatgatcagcagaacccctgaagtgacctgcgtggtggtggatgtgtctcacgaggaccctgaagtgaagttcaattggtacgtggacggcgtggaagtgcacaacgccaagaccaagcctagagaggaacagtacaacagcacctacagagtggtgtccgtgctgaccgtgctgcaccaggattggctgaacggcaaagagtacaagtgcaaggtgtccaacaaggccctgcctgcccctgaggaaaagaccatcagcaaggccaag

SEQ ID NO: 68 - protein, 107 aa, synthetic construct
GQPREPQVYTLPPSREEMTKNQVSLTCLVKGFYPSDIAVEWESNGQPENNYKTTPPVLDSDGSFFLYSKLTVDKSRWQQGNVFSCSVMHEALHNHYTQKSLSLSPGK

SEQ ID NO: 69 - DNA, 327 bp, synthetic construct
  source 1..327: mol_type = other DNA
ggccagcctagggaaccccaggtttacacactgcctccaagccgcgaggaaatgaccaagaaccaggtgtccctgacctgcctcgtgaagggcttctacccttccgatatcgccgtggaatgggagagcaatggccagcctgagaacaactacaagacaacccctcctgtgctggacagcgacggctcattcttcctgtacagcaagctgactgtggataagtcccggtggcagcagggcaacgtgttcagctgttctgtgatgcacgaagccctgcacaaccactacacccagaaaagcctgtctctgagccccggcaagtgataa

SEQ ID NO: 70 - DNA, 327 bp, synthetic construct; identical to SEQ ID NO: 69
  source 1..327: mol_type = other DNA

SEQ ID NO: 71 - protein, 107 aa, synthetic construct
GQPREPQVYTLPPSRDELTKNQVSLTCLVKGFYPSDIAVEWESNGQPENNYKTTPPVLDSDGSFFLYSKLTVDKSRWQQGNVFSCSVMHEALHNHYTQKSLSLSPGK

SEQ ID NO: 72 - RNA, 327 nt, synthetic construct
  source 1..327: mol_type = other RNA
ggccagcctagggaaccccaggtttacacactgcctccaagccgcgacgaactgaccaagaaccaggtgtccctgacctgcctcgtgaagggcttctacccttccgatatcgccgtggaatgggagagcaatggccagcctgagaacaactacaagacaacccctcctgtgctggacagcgacggctcattcttcctgtacagcaagctgactgtggataagtcccggtggcagcagggcaacgtgttcagctgttctgtgatgcacgaagccctgcacaaccactacacccagaaaagcctgtctctgagccccggcaagtgataa

SEQ ID NO: 73 - DNA, 327 bp, synthetic construct
  source 1..327: mol_type = other DNA
ggccagcctagggaaccccaggtttacacactgcctccaagccgcgacgaactgaccaagaaccaggtgtccctgacctgcctcgtgaagggcttctacccttccgatatcgccgtggaatgggagagcaatggccagcctgagaacaactacaagacaacccctcctgtgctggacagcgacggctcattcttcctgtacagcaagctgactgtggataagtcccggtggcagcagggcaacgtgttcagctgttctgtgatgcacgaagccctgcacaaccactacacccagaaaagcctgtctctgagccccggcaagtgataa

SEQ ID NO: 74 - protein, 107 aa, synthetic construct
GQPREPQVYTLPPSREEMTKNQVSLTCLVKGFYPSDIAVEWESNGQPENNYKTTPPVLDSDGSFFLYSKLTVDKSRWQQGNVFSCSVLHEALHSHYTQKSLSLSPGK

SEQ ID NO: 75 - RNA, 327 nt, synthetic construct
  source 1..327: mol_type = other RNA
ggccagcctagggaaccccaggtttacacactgcctccaagccgcgaggaaatgaccaagaaccaggtgtccctgacctgcctcgtgaagggcttctacccttccgatatcgccgtggaatgggagagcaatggccagcctgagaacaactacaagacaacccctcctgtgctggacagcgacggctcattcttcctgtacagcaagctgaccgtggacaagtccagatggcagcagggcaacgtgttcagctgtagcgtgctgcacgaagccctgcacagccactacacccagaaaagcctgtctctgagccccggcaaatgataa

SEQ ID NO: 76 - DNA, 327 bp, synthetic construct
  source 1..327: mol_type = other DNA
ggccagcctagggaaccccaggtttacacactgcctccaagccgcgaggaaatgaccaagaaccaggtgtccctgacctgcctcgtgaagggcttctacccttccgatatcgccgtggaatgggagagcaatggccagcctgagaacaactacaagacaacccctcctgtgctggacagcgacggctcattcttcctgtacagcaagctgaccgtggacaagtccagatggcagcagggcaacgtgttcagctgtagcgtgctgcacgaagccctgcacagccactacacccagaaaagcctgtctctgagccccggcaaatgataa

SEQ ID NO: 77 - protein, 107 aa, synthetic construct
GQPREPQVYTLPPSRDELTKNQVSLTCLVKGFYPSDIAVEWESNGQPENNYKTTPPVLDSDGSFFLYSKLTVDKSRWQQGNVFSCSVLHEALHSHYTQKSLSLSPGK

SEQ ID NO: 78 - RNA, 327 nt, synthetic construct
  source 1..327: mol_type = other RNA
ggccagcctagggaaccccaggtttacacactgcctccaagccgcgacgaactgaccaagaaccaggtgtccctgacctgcctcgtgaagggcttctacccttccgatatcgccgtggaatgggagagcaatggccagcctgagaacaactacaagacaacccctcctgtgctggacagcgacggctcattcttcctgtacagcaagctgaccgtggacaagtccagatggcagcagggcaacgtgttcagctgtagcgtgctgcacgaagccctgcacagccactacacccagaaaagcctgtctctgagccccggcaaatgataa

SEQ ID NO: 79 - DNA, 327 bp, synthetic construct
  source 1..327: mol_type = other DNA
ggccagcctagggaaccccaggtttacacactgcctccaagccgcgacgaactgaccaagaaccaggtgtccctgacctgcctcgtgaagggcttctacccttccgatatcgccgtggaatgggagagcaatggccagcctgagaacaactacaagacaacccctcctgtgctggacagcgacggctcattcttcctgtacagcaagctgaccgtggacaagtccagatggcagcagggcaacgtgttcagctgtagcgtgctgcacgaagccctgcacagccactacacccagaaaagcctgtctctgagccccggcaaatgataa

SEQ ID NO: 80 - protein, 107 aa, synthetic construct
GQPREPQVCTLPPSREEMTKNQVSLSCAVKGFYPSDIAVEWESNGQPENNYKTTPPVLDSDGSFFLVSKLTVDKSRWQQGNVFSCSVLHEALHSHYTQKSLSLSPGK

SEQ ID NO: 81 - RNA, 327 nt, synthetic construct
  source 1..327: mol_type = other RNA
ggccagcctcgcgaacctcaagtctgtacactgcctcctagccgcgaggaaatgaccaagaaccaggtgtccctgagctgcgccgtgaagggcttttacccttccgatatcgccgtggaatgggagagcaatggccagcctgagaacaactacaagacaacccctcctgtgctggacagcgacggctcattcttcctggtgtccaagctgacagtggacaagagcagatggcagcagggcaacgtgttcagctgcagcgtgctgcatgaagccctgcacagccactacacccagaagtccctgtctctgagccccggcaagtgataa

SEQ ID NO: 82 - DNA, 327 bp, synthetic construct
  source 1..327: mol_type = other DNA
ggccagcctcgcgaacctcaagtctgtacactgcctcctagccgcgaggaaatgaccaagaaccaggtgtccctgagctgcgccgtgaagggcttttacccttccgatatcgccgtggaatgggagagcaatggccagcctgagaacaactacaagacaacccctcctgtgctggacagcgacggctcattcttcctggtgtccaagctgacagtggacaagagcagatggcagcagggcaacgtgttcagctgcagcgtgctgcatgaagccctgcacagccactacacccagaagtccctgtctctgagccccggcaagtgataa

SEQ ID NO: 83 - protein, 107 aa, synthetic construct
GQPREPQVCTLPPSRDELTKNQVSLSCAVKGFYPSDIAVEWESNGQPENNYKTTPPVLDSDGSFFLVSKLTVDKSRWQQGNVFSCSVLHEALHSHYTQKSLSLSPGK

SEQ ID NO: 84 - RNA, 327 nt, synthetic construct
  source 1..327: mol_type = other RNA
ggccagcctcgcgaacctcaagtctgtacactgcctcctagccgcgacgaactgaccaagaaccaggtgtccctgagctgcgccgtgaagggcttttacccttccgatatcgccgtggaatgggagagcaatggccagcctgagaacaactacaagacaacccctcctgtgctggacagcgacggctcattcttcctggtgtccaagctgacagtggacaagagcagatggcagcagggcaacgtgttcagctgcagcgtgctgcatgaagccctgcacagccactacacccagaagtccctgtctctgagccccggcaagtgataa

SEQ ID NO: 85 - DNA, 327 bp, synthetic construct
  source 1..327: mol_type = other DNA
ggccagcctcgcgaacctcaagtctgtacactgcctcctagccgcgacgaactgaccaagaaccaggtgtccctgagctgcgccgtgaagggcttttacccttccgatatcgccgtggaatgggagagcaatggccagcctgagaacaactacaagacaacccctcctgtgctggacagcgacggctcattcttcctggtgtccaagctgacagtggacaagagcagatggcagcagggcaacgtgttcagctgcagcgtgctgcatgaagccctgcacagccactacacccagaagtccctgtctctgagccccggcaagtgataa

SEQ ID NO: 86 - protein, 107 aa, synthetic construct
GQPREPQVYTLPPCREEMTKNQVSLWCLVKGFYPSDIAVEWESNGQPENNYKTTPPVLDSDGSFFLYSKLTVDKSRWQQGNVFSCSVLHEALHSHYTQKSLSLSPGK

SEQ ID NO: 87 - RNA, 327 nt, synthetic construct
  source 1..327: mol_type = other RNA
ggccagcctagggaaccccaggtttacaccctgcctccatgccgcgaggaaatgaccaagaaccaggtgtccctgtggtgcctggtcaagggcttctacccttccgatatcgccgtggaatgggagagcaatggccagcctgagaacaactacaagacaacccctcctgtgctggacagcgacggctcattcttcctgtacagcaagctgacagtggacaagagcagatggcagcagggcaacgtgttcagctgcagcgtgctgcatgaagccctgcacagccactacacccagaagtccctgtctctgagccccggcaagtgataa

SEQ ID NO: 88 - DNA, 327 bp, synthetic construct
  source 1..327: mol_type = other DNA
ggccagcctagggaaccccaggtttacaccctgcctccatgccgcgaggaaatgaccaagaaccaggtgtccctgtggtgcctggtcaagggcttctacccttccgatatcgccgtggaatgggagagcaatggccagcctgagaacaactacaagacaacccctcctgtgctggacagcgacggctcattcttcctgtacagcaagctgacagtggacaagagcagatggcagcagggcaacgtgttcagctgcagcgtgctgcatgaagccctgcacagccactacacccagaagtccctgtctctgagccccggcaagtgataa

SEQ ID NO: 89 - protein, 107 aa, synthetic construct
GQPREPQVYTLPPCRDELTKNQVSLWCLVKGFYPSDIAVEWESNGQPENNYKTTPPVLDSDGSFFLYSKLTVDKSRWQQGNVFSCSVLHEALHSHYTQKSLSLSPGK

SEQ ID NO: 90 - RNA, 327 nt, synthetic construct
  source 1..327: mol_type = other RNA
ggccagcctagggaaccccaggtttacaccctgcctccatgccgcgacgaactgaccaagaaccaggtgtccctgtggtgcctggtcaagggcttctacccttccgatatcgccgtggaatgggagagcaatggccagcctgagaacaactacaagacaacccctcctgtgctggacagcgacggctcattcttcctgtacagcaagctgacagtggacaagagcagatggcagcagggcaacgtgttcagctgcagcgtgctgcatgaagccctgcacagccactacacccagaagtccctgtctctgagccccggcaagtgataa

SEQ ID NO: 91 - DNA, 327 bp, synthetic construct
  source 1..327: mol_type = other DNA
ggccagcctagggaaccccaggtttacaccctgcctccatgccgcgacgaactgaccaagaaccaggtgtccctgtggtgcctggtcaagggcttctacccttccgatatcgccgtggaatgggagagcaatggccagcctgagaacaactacaagacaacccctcctgtgctggacagcgacggctcattcttcctgtacagcaagctgacagtggacaagagcagatggcagcagggcaacgtgttcagctgcagcgtgctgcatgaagccctgcacagccactacacccagaagtccctgtctctgagccccggcaagtgataa

SEQ ID NO: 92 - protein, 107 aa, synthetic construct [sequence omitted]

SEQ ID NO: 93 - RNA, 327 nt, synthetic construct
  source 1..327: mol_type = other RNA
cgtacggtggccgctcctagcgtgttcatctttccacctagcgacgagcagctgaagtctggcacagcctctgtcgtgtgcctgctcaacaacttctaccccagagaagccaaggtgcagtggaaggtggacaacgccctgcagagcggcaatagccaagagagcgtgaccgagcaggacagcaaggactctacctacagcctgagcagcacactgaccctgagcaaggccgactacgagaagcacaaagtgtacgcctgcgaagtgacccaccagggcctttctagccctgtgaccaagagcttcaaccggggcgagtgctgataa

SEQ ID NO: 94 - DNA, 327 bp, synthetic construct
  source 1..327: mol_type = other DNA
cgtacggtggccgctcctagcgtgttcatctttccacctagcgacgagcagctgaagtctggcacagcctctgtcgtgtgcctgctcaacaacttctaccccagagaagccaaggtgcagtggaaggtggacaacgccctgcagagcggcaatagccaagagagcgtgaccgagcaggacagcaaggactctacctacagcctgagcagcacactgaccctgagcaaggccgactacgagaagcacaaagtgtacgcctgcgaagtgacccaccagggcctttctagccctgtgaccaagagcttcaaccggggcgagtgctgataa

SEQ ID NO: 95 - protein, 107 aa, synthetic construct
ASVAAPSVFIFPPSDEELKSGTASVVCLLNNFYPREAKVQWKVDNALQSGNSQESVTEQDSKDSTYSLSSTLTLSKADYEKHKVYACEVTHQGLSSPVTKSFNRGEC

SEQ ID NO: 96 - RNA, 321 nt, synthetic construct
  source 1..321: mol_type = other RNA
gcatctgtggccgctcctagcgtgttcatcttcccacctagcgacgaggaactgaagtctggcacagccagcgtcgtgtgcctgctgaacaacttctaccccagagaagccaaggtgcagtggaaggtggacaacgccctgcagagcggcaatagccaagagagcgtgaccgagcaggacagcaaggactctacctacagcctgagcagcaccctgacactgagcaaggccgactacgagaagcacaaagtgtacgcctgcgaagtgacccaccagggcctttctagccctgtgaccaagagcttcaaccggggcgagtgc

SEQ ID NO: 97 - DNA, 321 bp, synthetic construct
  source 1..321: mol_type = other DNA
gcatctgtggccgctcctagcgtgttcatcttcccacctagcgacgaggaactgaagtctggcacagccagcgtcgtgtgcctgctgaacaacttctaccccagagaagccaaggtgcagtggaaggtggacaacgccctgcagagcggcaatagccaagagagcgtgaccgagcaggacagcaaggactctacctacagcctgagcagcaccctgacactgagcaaggccgactacgagaagcacaaagtgtacgcctgcgaagtgacccaccagggcctttctagccctgtgaccaagagcttcaaccggggcgagtgc

SEQ ID NO: 98 - protein, 107 aa, synthetic construct
RTVAAPSVFIFPPSDKRLKSGTASVVCLLNNFYPREAKVQWKVDNALQSGNSQESVTEQDSKDSTYSLSSTLTLSKADYEKHKVYACEVTHQGLSSPVTKSFNRGEC

SEQ ID NO: 99 - RNA, 327 nt, synthetic construct
  source 1..327: mol_type = other RNA
cgtacggtggccgctcctagcgtgttcatctttccacctagcgacaagagactgaagtctggcacagcctctgtcgtgtgcctgctcaacaacttctaccccagagaagccaaggtgcagtggaaggtggacaacgccctgcagagcggcaatagccaagagagcgtgaccgagcaggacagcaaggactctacctacagcctgagcagcacactgaccctgagcaaggccgactacgagaagcacaaagtgtacgcctgcgaagtgacccaccagggcctttctagccctgtgaccaagagcttcaaccggggcgagtgctgataa

SEQ ID NO: 100 - DNA, 327 bp, synthetic construct
  source 1..327: mol_type = other DNA
cgtacggtggccgctcctagcgtgttcatctttccacctagcgacaagagactgaagtctggcacagcctctgtcgtgtgcctgctcaacaacttctaccccagagaagccaaggtgcagtggaaggtggacaacgccctgcagagcggcaatagccaagagagcgtgaccgagcaggacagcaaggactctacctacagcctgagcagcacactgaccctgagcaaggccgactacgagaagcacaaagtgtacgcctgcgaagtgacccaccagggcctttctagccctgtgaccaagagcttcaaccggggcgagtgctgataa

SEQ ID NO: 101 - protein, 107 aa, synthetic construct
RTVAAPSVFIFPPSDRKLKSGTASVVCLLNNFYPREAKVQWKVDNALQSGNSQESVTEQDSKDSTYSLSSTLTLSKADYEKHKVYACEVTHQGLSSPVTKSFNRGEC

SEQ ID NO: 102 - RNA, 327 nt, synthetic construct
  source 1..327: mol_type = other RNA
cgtacggtggccgctcctagcgtgttcatctttccacctagcgacagaaagctgaagtctggcacagcctctgtcgtgtgcctgctcaacaacttctaccccagagaagccaaggtgcagtggaaggtggacaacgccctgcagagcggcaatagccaagagagcgtgaccgagcaggacagcaaggactctacctacagcctgagcagcacactgaccctgagcaaggccgactacgagaagcacaaagtgtacgcctgcgaagtgacccaccagggcctttctagccctgtgaccaagagcttcaaccggggcgagtgctgataa

SEQ ID NO: 103 - DNA, 327 bp, synthetic construct
  source 1..327: mol_type = other DNA
cgtacggtggccgctcctagcgtgttcatctttccacctagcgacagaaagctgaagtctggcacagcctctgtcgtgtgcctgctcaacaacttctaccccagagaagccaaggtgcagtggaaggtggacaacgccctgcagagcggcaatagccaagagagcgtgaccgagcaggacagcaaggactctacctacagcctgagcagcacactgaccctgagcaaggccgactacgagaagcacaaagtgtacgcctgcgaagtgacccaccagggcctttctagccctgtgaccaagagcttcaaccggggcgagtgctgataa

SEQ ID NO: 104 - protein, 15 aa, synthetic construct
EPKSCDKTHTCPPCP

SEQ ID NO: 105 - RNA, 45 nt, synthetic construct
  source 1..45: mol_type = other RNA
gaacccaagagctgcgacaagacccacacctgtcctccatgtcct

SEQ ID NO: 106 - DNA, 45 bp, synthetic construct
  source 1..45: mol_type = other DNA
gaacccaagagctgcgacaagacccacacctgtcctccatgtcct

SEQ ID NO: 107 - protein, 15 aa, synthetic construct
EPKSSDKTHTCPPCP

SEQ ID NO: 108 - RNA, 45 nt, synthetic construct
  source 1..45: mol_type = other RNA
gaacctaagagcagcgacaagacccacacctgtcctccatgtcct

SEQ ID NO: 109 - DNA, 45 bp, synthetic construct
  source 1..45: mol_type = other DNA
gaacctaagagcagcgacaagacccacacctgtcctccatgtcct

SEQ ID NO: 110 - protein, 10 aa, synthetic construct
DKTHTCPPCP

SEQ ID NO: 111 - RNA, 30 nt, synthetic construct
  source 1..30: mol_type = other RNA
gataagacccacacctgtcctccatgtcca

SEQ ID NO: 112 - DNA, 30 bp, synthetic construct
  source 1..30: mol_type = other DNA
gataagacccacacctgtcctccatgtcca

SEQ ID NO: 113 - RNA, 1446 nt, synthetic construct
  source 1..1446: mol_type = other RNA
atggattggatttggagaatcctgttcctcgtgggcgccgctaccggagcccactcccagggcagactgtttcagtctggcgccgaagtgaaaagaccaggcgcctctgtgcggatcagctgcagagctgacgacgacccctacaccgacgacgataccttcaccaagtactggacccactggatcagacaggcccctggacaaagacctgagtggctgggagtgatcagccctcacttcgccagacctatctacagctacaagttccgggacagactgaccctgaccagagacagctctctgaccgccgtgtacctggaactgaagggcctgcagcctgacgacagcggcatctacttttgcgccagagatcccttcggcgacagagcccctcactacaactaccacatggacgtgtggggcggaggcacagccgtgatagttagcagcgcctctacaaagggccctagcgtgttccctctggctcctagcagcaagtcgacatctggcggaacagccgctctgggctgtctggtcaaggactactttcccgagcctgtgacagtgtcctggaactctggcgctctgacaagcggcgtgcacacatttccagccgtgctgcaaagcagcggcctgtactctctgagcagcgtggtcacagtgccaagctctagcctgggcacccagacctacatctgcaatgtgaaccacaagcctagcaacaccaaggtggacaagagagtggaacccaagagctgcgacaagacccacacctgtcctccatgtcctgctccagaactgctcggcggaccttccgtgttcctgtttcctccaaagcctaaggacaccctgatgatcagcagaacccctgaagtgacctgcgtggtggtggatgtgtctcacgaggacccagaagtgaagttcaattggtacgtggacggcgtggaagtgcacaacgccaagaccaagcctagagaggaacagtacaacagcacctacagagtggtgtccgtgctgacagtgctgcaccaggattggctgaacggcaaagagtacaagtgcaaggtgtccaacaaggccctgcctgctcctatcgagaaaaccatcagcaaggccaagggccagcctagggaaccccaggtttacacactgcctccaagccgcgaggaaatgaccaagaaccaggtgtccctgacctgcctcgtgaagggcttctacccttccgatatcgccgtggaatgggagagcaatggccagcctgagaacaactacaagacaacccctcctgtgctggacagcgacggctcattcttcctgtacagcaagctgactgtggataagtcccggtggcagcagggcaacgtgttcagctgttctgtgatgcacgaagccctgcacaaccactacacccagaaaagcctgtctctgagccccggcaagtgataa

SEQ ID NO: 114 - RNA, 1446 nt, synthetic construct
  source 1..1446: mol_type = other RNA
atggattggatttggagaatcctgttcctcgtgggcgccgctaccggagcccactcccagggcagactgtttcagtctggcgccgaagtgaaaagaccaggcgcctctgtgcggatcagctgcagagctgacgacgacccctacaccgacgacgataccttcaccaagtactggacccactggatcagacaggcccctggacaaagacctgagtggctgggagtgatcagccctcacttcgccagacctatctacagctacaagttccgggacagactgaccctgaccagagacagctctctgaccgccgtgtacctggaactgaagggcctgcagcctgacgacagcggcatctacttttgcgccagagatcccttcggcgacagagcccctcactacaactaccacatggacgtgtggggcggaggcacagccgtgatagttagcagcgcctctacaaagggccctagcgtgttccctctggctcctagcagcaagtcgacatctggcggaacagccgctctgggctgtctggtcaaggactactttcccgagcctgtgacagtgtcctggaactctggcgctctgacaagcggcgtgcacacatttccagccgtgctgcaaagcagcggcctgtactctctgagcagcgtggtcacagtgccaagctctagcctgggcacccagacctacatctgcaatgtgaaccacaagcctagcaacaccaaggtggacaagagagtggaacccaagagctgcgacaagacccacacctgtcctccatgtcctgctccagaactgctcggcggaccttccgtgttcctgtttcctccaaagcctaaggacaccctgatgatcagcagaacccctgaagtgacctgcgtggtggtggatgtgtctcacgaggacccagaagtgaagttcaattggtacgtggacggcgtggaagtgcacaacgccaagaccaagcctagagaggaacagtacaacagcacctacagagtggtgtccgtgctgacagtgctgcaccaggattggctgaacggcaaagagtacaagtgcaaggtgtccaacaaggccctgcctgctcctatcgagaaaaccatcagcaaggccaagggccagcctagggaaccccaggtttacacactgcctccaagccgcgaggaaatgaccaagaaccaggtgtccctgacctgcctcgtgaagggcttctacccttccgatatcgccgtggaatgggagagcaatggccagcctgagaacaactacaagacaacccctcctgtgctggacagcgacggctcattcttcctgtacagcaagctgaccgtggacaagtccagatggcagcagggcaacgtgttcagctgtagcgtgctgcacgaagccctgcacagccactacacccagaaaagcctgtctctgagccccggcaaatgataa

SEQ ID NO: 115 - RNA, 1446 nt, synthetic construct
  source 1..1446: mol_type = other RNA
atggattggatttggagaatcctgttcctcgtgggcgccgctaccggagcccactcccagggcagactgtttcagtctggcgccgaagtgaaaagaccaggcgcctctgtgcggatcagctgcagagctgacgacgacccctacaccgacgacgataccttcaccaagtactggacccactggatcagacaggcccctggacaaagacctgagtggctgggagtgatcagccctcacttcgccagacctatctacagctacaagttccgggacagactgaccctgaccagagacagctctctgaccgccgtgtacctggaactgaagggcctgcagcctgacgacagcggcatctacttttgcgccagagatcccttcggcgacagagcccctcactacaactaccacatggacgtgtggggcggaggcacagccgtgatagttagcagcgcctctacaaagggccctagcgtgttccctctggctcctagcagcaagtcgacatctggcggaacagccgctctgggctgtctggtcaaggactactttcccgagcctgtgacagtgtcctggaactctggcgctctgacaagcggcgtgcacacatttccagccgtgctgcaaagcagcggcctgtactctctgagcagcgtggtcacagtgccaagctctagcctgggcacccagacctacatctgcaatgtgaaccacaagcctagcaacaccaaggtggacaagagagtggaacccaagagctgcgacaagacccacacctgtcctccatgtcctgctccagaactgctcggcggaccttccgtgttcctgtttcctccaaagcctaaggacaccctgatgatcagcagaacccctgaagtgacctgcgtggtggtggatgtgtctcacgaggacccagaagtgaagttcaattggtacgtggacggcgtggaagtgcacaacgccaagaccaagcctagagaggaacagtacaacagcacctacagagtggtgtccgtgctgacagtgctgcaccaggattggctgaacggcaaagagtacaagtgcaaggtgtccaacaaggccctgcctgctcctatcgagaaaaccatcagcaaggccaagggccagcctcgcgaacctcaagtctgtacactgcctcctagccgcgaggaaatgaccaagaaccaggtgtccctgagctgcgccgtgaagggcttttacccttccgatatcgccgtggaatgggagagcaatggccagcctgagaacaactacaagacaacccctcctgtgctggacagcgacggctcattcttcctggtgtccaagctgacagtggacaagagcagatggcagcagggcaacgtgttcagctgcagcgtgctgcatgaagccctgcacagccactacacccagaagtccctgtctctgagccccggcaagtgataa

SEQ ID NO: 116 - RNA, 1446 nt, synthetic construct
  source 1..1446: mol_type = other RNA
atggattggatttggagaatcctgttcctcgtgggcgccgctaccggagcccactcccagggcagactgtttcagtctggcgccgaagtgaaaagaccaggcgcctctgtgcggatcagctgcagagctgacgacgacccctacaccgacgacgataccttcaccaagtactggacccactggatcagacaggcccctggacaaagacctgagtggctgggagtgatcagccctcacttcgccagacctatctacagctacaagttccgggacagactgaccctgaccagagacagctctctgaccgccgtgtacctggaactgaagggcctgcagcctgacgacagcggcatctacttttgcgccagagatcccttcggcgacagagcccctcactacaactaccacatggacgtgtggggcggaggcacagccgtgatagttagcagcgcctctacaaagggccctagcgtgttccctctggctcctagcagcaagtcgacatctggcggaacagccgctctgggctgtctggtcaaggactactttcccgagcctgtgacagtgtcctggaactctggcgctctgacaagcggcgtgcacacatttccagccgtgctgcaaagcagcggcctgtactctctgagcagcgtggtcacagtgccaagctctagcctgggcacccagacctacatctgcaatgtgaaccacaagcctagcaacaccaaggtggacaagagagtggaacccaagagctgcgacaagacccacacctgtcctccatgtcctgctccagaactgctcggcggaccttccgtgttcctgtttcctccaaagcctaaggacaccctgatgatcagcagaacccctgaagtgacctgcgtggtggtggatgtgtctcacgaggacccagaagtgaagttcaattggtacgtggacggcgtggaagtgcacaacgccaagaccaagcctagagaggaacagtacaacagcacctacagagtggtgtccgtgctgacagtgctgcaccaggattggctgaacggcaaagagtacaagtgcaaggtgtccaacaaggccctgcctgctcctatcgagaaaaccatcagcaaggccaagggccagcctagggaaccccaggtttacaccctgcctccatgccgcgaggaaatgaccaagaaccaggtgtccctgtggtgcctggtcaagggcttctacccttccgatatcgccgtggaatgggagagcaatggccagcctgagaacaactacaagacaacccctcctgtgctggacagcgacggctcattcttcctgtacagcaagctgacagtggacaagagcagatggcagcagggcaacgtgttcagctgcagcgtgctgcatgaagccctgcacagccactacacccagaagtccctgtctctgagccccggcaagtgataa

SEQ ID NO: 117 - RNA, 1446 nt, synthetic construct
  source 1..1446: mol_type = other RNA
atggattggatttggagaatcctgttcctcgtgggcgccgctaccggagcccactcccagggcagactgtttcagtctggcgccgaagtgaaaagaccaggcgcctctgtgcggatcagctgcagagctgacgacgacccctacaccgacgacgataccttcaccaagtactggacccactggatcagacaggcccctggacaaagacctgagtggctgggagtgatcagccctcacttcgccagacctatctacagctacaagttccgggacagactgaccctgaccagagacagctctctgaccgccgtgtacctggaactgaagggcctgcagcctgacgacagcggcatctacttttgcgccagagatcccttcggcgacagagcccctcactacaactaccacatggacgtgtggggcggaggcacagccgtgatagttagcagcgcctctacaaagggccctagcgtgttccctctggctcctagcagcaagtcgacatctggcggaacagccgctctgggctgtctggtcaaggactactttcccgagcctgtgacagtgtcctggaactctggcgctctgacaagcggcgtgcacacatttccagccgtgctgcaaagcagcggcctgtactctctgagcagcgtggtcacagtgccaagctctagcctgggcacccagacctacatctgcaatgtgaaccacaagcctagcaacaccaaggtggacaagagagtggaacccaagagctgcgacaagacccacacctgtcctccatgtcctgctccagaactgctggccggaccttccgtgttcctgtttcctccaaagcctaaggacaccctgatgatcagcagaacccctgaagtgacctgcgtggtggtggatgtgtctcacgaggaccctgaagtgaagttcaattggtacgtggacggcgtggaagtgcacaacgccaagaccaagcctagagaggaacagtacaacagcacctacagagtggtgtccgtgctgaccgtgctgcaccaggattggctgaacggcaaagagtacaagtgcaaggtgtccaacaaggccctgcctctgcctgaggaaaagaccatcagcaaggccaagggccagcctagggaaccccaggtttacacactgcctccaagccgcgaggaaatgaccaagaaccaggtgtccctgacctgcctcgtgaagggcttctacccttccgatatcgccgtggaatgggagagcaatggccagcctgagaacaactacaagacaacccctcctgtgctggacagcgacggctcattcttcctgtacagcaagctgaccgtggacaagtccagatggcagcagggcaacgtgttcagctgtagcgtgctgcacgaagccctgcacagccactacacccagaaaagcctgtctctgagccccggcaaatgataa

SEQ ID NO: 118 - RNA, 1446 nt, synthetic construct
  source 1..1446: mol_type = other RNA
atggattggatttggagaatcctgttcctcgtgggcgccgctaccggagcccactcccagggcagactgtttcagtctggcgccgaagtgaaaagaccaggcgcctctgtgcggatcagctgcagagctgacgacgacccctacaccgacgacgataccttcaccaagtactggacccactggatcagacaggcccctggacaaagacctgagtggctgggagtgatcagccctcacttcgccagacctatctacagctacaagttccgggacagactgaccctgaccagagacagctctctgaccgccgtgtacctggaactgaagggcctgcagcctgacgacagcggcatctacttttgcgccagagatcccttcggcgacagagcccctcactacaactaccacatggacgtgtggggcggaggcacagccgtgatagttagcagcgcctctacaaagggccctagcgtgttccctctggctcctagcagcaagtcgacatctggcggaacagccgctctgggctgtctggtcaaggactactttcccgagcctgtgacagtgtcctggaactctggcgctctgacaagcggcgtgcacacatttccagccgtgctgcaaagcagcggcctgtactctctgagcagcgtggtcacagtgccaagctctagcctgggcacccagacctacatctgcaatgtgaaccacaagcctagcaacaccaaggtggacaagagagtggaacccaagagctgcgacaagacccacacctgtcctccatgtcctgctccagaactgctggccggaccttccgtgttcctgtttcctccaaagcctaaggacaccctgatgatcagcagaacccctgaagtgacctgcgtggtggtggatgtgtctcacgaggaccctgaagtgaagttcaattggtacgtggacggcgtggaagtgcacaacgccaagaccaagcctagagaggaacagtacaacagcacctacagagtggtgtccgtgctgaccgtgctgcaccaggattggctgaacggcaaagagtacaagtgcaaggtgtccaacaaggccctgcctgcccctgaggaaaagaccatcagcaaggccaagggccagcctagggaaccccaggtttacacactgcctccaagccgcgaggaaatgaccaagaaccaggtgtccctgacctgcctcgtgaagggcttctacccttccgatatcgccgtggaatgggagagcaatggccagcctgagaacaactacaagacaacccctcctgtgctggacagcgacggctcattcttcctgtacagcaagctgaccgtggacaagtccagatggcagcagggcaacgtgttcagctgtagcgtgctgcacgaagccctgcacagccactacacccagaaaagcctgtctctgagccccggcaaatgataa

SEQ ID NO: 119 - RNA, 1446 nt, synthetic construct
  source 1..1446: mol_type = other RNA
atggattggatttggagaatcctgttcctcgtgggcgccgctaccggagcccactcccagggcagactgtttcagtctggcgccgaagtgaaaagaccaggcgcctctgtgcggatcagctgcagagctgacgacgacccctacaccgacgacgataccttcaccaagtactggacccactggatcagacaggcccctggacaaagacctgagtggctgggagtgatcagccctcacttcgccagacctatctacagctacaagttccgggacagactgaccctgaccagagacagctctctgaccgccgtgtacctggaactgaagggcctgcagcctgacgacagcggcatctacttttgcgccagagatcccttcggcgacagagcccctcactacaactaccacatggacgtgtggggcggaggcacagccgtgatagttagcagcgcctctacaaagggccctagcgtgttccctctggctcctagcagcaagtcgacatctggcggaacagccgctctgggctgtctggtcaaggactactttcccgagcctgtgacagtgtcctggaactctggcgctctgacaagcggcgtgcacacatttccagccgtgctgcaaagcagcggcctgtactctctgagcagcgtggtcacagtgccaagctctagcctgggcacccagacctacatctgcaatgtgaaccacaagcctagcaacaccaaggtggacaagagagtggaacccaagagctgcgacaagacccacacctgtcctccatgtcctgctccagaactgctggccggaccttccgtgttcctgtttcctccaaagcctaaggacaccctgatgatcagcagaacccctgaagtgacctgcgtggtggtggatgtgtctcacgaggaccctgaagtgaagttcaattggtacgtggacggcgtggaagtgcacaacgccaagaccaagcctagagaggaacagtacaacagcacctacagagtggtgtccgtgctgaccgtgctgcaccaggattggctgaacggcaaagagtacaagtgcaaggtgtccaacaaggccctgcctgcccctatcgaaaagaccatcagcaaggccaagggccagcctagggaaccccaggtttacacactgcctccaagccgcgaggaaatgaccaagaaccaggtgtccctgacctgcctcgtgaagggcttctacccttccgatatcgccgtggaatgggagagcaatggccagcctgagaacaactacaagacaacccctcctgtgctggacagcgacggctcattcttcctgtacagcaagctgaccgtggacaagtccagatggcagcagggcaacgtgttcagctgtagcgtgctgcacgaagccctgcacagccactacacccagaaaagcctgtctctgagccccggcaaatgataa

SEQ ID NO: 120 - RNA, 1446 nt, synthetic construct
  source 1..1446: mol_type = other RNA
atggattggatttggagaatcctgttcctcgtgggcgccgctaccggagcccactcccagggcagactgtttcagtctggcgccgaagtgaaaagaccaggcgcctctgtgcggatcagctgcagagctgacgacgacccctacaccgacgacgataccttcaccaagtactggacccactggatcagacaggcccctggacaaagacctgagtggctgggagtgatcagccctcacttcgccagacctatctacagctacaagttccgggacagactgaccctgaccagagacagctctctgaccgccgtgtacctggaactgaagggcctgcagcctgacgacagcggcatctacttttgcgccagagatcccttcggcgacagagcccctcactacaactaccacatggacgtgtggggcggaggcacagccgtgatagttagcagcgcctctacaaagggccctagcgtgttccctctggctcctagcagcaagtcgacatctggcggaacagccgctctgggctgtctggtcaaggactactttcccgagcctgtgacagtgtcctggaactctggcgctctgacaagcggcgtgcacacatttccagccgtgctgcaaagcagcggcctgtactctctgagcagcgtggtcacagtgccaagctctagcctgggcacccagacctacatctgcaatgtgaaccacaagcctagcaacaccaaggtggacaagagagtggaacccaagagctgcgacaagacccacacctgtcctccatgtcctgctccagaactgctgggcggaccttccgtgttcctgtttcctccaaagcctaaggacaccctgatgatcagcagaacccctgaagtgacctgcgtggtggtggatgtgtctcacgaggaccctgaagtgaagttcaattggtacgtggacggcgtggaagtgcacaacgccaagaccaagcctagagaggaacagtacaacagcacctacagagtggtgtccgtgctgaccgtgctgcaccaggattggctgaacggcaaagagtacaagtgcaaggtgtccaacaaggccctgcctgcccctgaggaaaagaccatcagcaaggccaagggccagcctagggaaccccaggtttacacactgcctccaagccgcgaggaaatgaccaagaaccaggtgtccctgacctgcctcgtgaagggcttctacccttccgatatcgccgtggaatgggagagcaatggccagcctgagaacaactacaagacaacccctcctgtgctggacagcgacggctcattcttcctgtacagcaagctgaccgtggacaagtccagatggcagcagggcaacgtgttcagctgtagcgtgctgcacgaagccctgcacagccactacacccagaaaagcctgtctctgagccccggcaaatgataa

SEQ ID NO: 121 - RNA, 1446 nt, synthetic construct
  source 1..1446: mol_type = other RNA
atggattggatttggagaatcctgttcctcgtgggcgccgctaccggagcccactcccagggcagactgtttcagtctggcgccgaagtgaaaagaccaggcgcctctgtgcggatcagctgcagagctgacgacgacccctacaccgacgacgataccttcaccaagtactggacccactggatcagacaggcccctggacaaagacctgagtggctgggagtgatcagccctcacttcgccagacctatctacagctacaagttccgggacagactgaccctgaccagagacagctctctgaccgccgtgtacctggaactgaagggcctgcagcctgacgacagcggcatctacttttgcgccagagatcccttcggcgacagagcccctcactacaactaccacatggacgtgtggggcggaggcacagccgtgatagttagcagcgcctctacaaagggccctagcgtgttccctctggctcctagcagcaagtcgacatctggcggaacagccgctctgggctgtctggtcaaggactactttcccgagcctgtgacagtgtcctggaactctggcgctctgacaagcggcgtgcacacatttccagccgtgctgcaaagcagcggcctgtactctctgagcagcgtggtcacagtgccaagctctagcctgggcacccagacctacatctgcaatgtgaaccacaagcctagcaacaccaaggtggacaagagagtggaacccaagagctgcgacaagacccacacctgtcctccatgtcctgctccagaactgctggccggaccttccgtgttcctgtttcctccaaagcctaaggacaccctgatgatcagcagaacccctgaagtgacctgcgtggtggtggatgtgtctcacgaggaccctgaagtgaagttcaattggtacgtggacggcgtggaagtgcacaacgccaagaccaagcctagagaggaacagtacaacagcacctacagagtggtgtccgtgctgaccgtgctgcaccaggattggctgaacggcaaagagtacaagtgcaaggtgtccaacaaggccctgcctctgcctgaggaaaagaccatcagcaaggccaagggccagcctcgcgaacctcaagtctgtacactgcctcctagccgcgaggaaatgaccaagaaccaggtgtccctgagctgcgccgtgaagggcttttacccttccgatatcgccgtggaatgggagagcaatggccagcctgagaacaactacaagacaacccctcctgtgctggacagcgacggctcattcttcctggtgtccaagctgacagtggacaagagcagatggcagcagggcaacgtgttcagctgcagcgtgctgcatgaagccctgcacagccactacacccagaagtccctgtctctgagccccggcaagtgataa

SEQ ID NO: 122 - RNA, 1446 nt, synthetic construct
  source 1..1446: mol_type = other RNA
atggattggatttggagaatcctgttcctcgtgggcgccgctaccggagcccactcccagggcagactgtttcagtctggcgccgaagtgaaaagaccaggcgcctctgtgcggatcagctgcagagctgacgacgacccctacaccgacgacgataccttcaccaagtactggacccactggatcagacaggcccctggacaaagacctgagtggctgggagtgatcagccctcacttcgccagacctatctacagctacaagttccgggacagactgaccctgaccagagacagctctctgaccgccgtgtacctggaactgaagggcctgcagcctgacgacagcggcatctacttttgcgccagagatcccttcggcgacagagcccctcactacaactaccacatggacgtgtggggcggaggcacagccgtgatagttagcagcgcctctacaaagggccctagcgtgttccctctggctcctagcagcaagtcgacatctggcggaacagccgctctgggctgtctggtcaaggactactttcccgagcctgtgacagtgtcctggaactctggcgctctgacaagcggcgtgcacacatttccagccgtgctgcaaagcagcggcctgtactctctgagcagcgtggtcacagtgccaagctctagcctgggcacccagacctacatctgcaatgtgaaccacaagcctagcaacaccaaggtggacaagagagtggaacccaagagctgcgacaagacccacacctgtcctccatgtcctgctccagaactgctggccggaccttccgtgttcctgtttcctccaaagcctaaggacaccctgatgatcagcagaacccctgaagtgacctgcgtggtggtggatgtgtctcacgaggaccctgaagtgaagttcaattggtacgtggacggcgtggaagtgcacaacgccaagaccaagcctagagaggaacagtacaacagcacctacagagtggtgtccgtgctgaccgtgctgcaccaggattggctgaacggcaaagagtacaagtgcaaggtgtccaacaaggccctgcctgcccctgaggaaaagaccatcagcaaggccaagggccagcctcgcgaacctcaagtctgtacactgcctcctagccgcgaggaaatgaccaagaaccaggtgtccctgagctgcgccgtgaagggcttttacccttccgatatcgccgtggaatgggagagcaatggccagcctgagaacaactacaagacaacccctcctgtgctggacagcgacggctcattcttcctggtgtccaagctgacagtggacaagagcagatggcagcagggcaacgtgttcagctgcagcgtgctgcatgaagccctgcacagccactacacccagaagtccctgtctctgagccccggcaagtgataa

SEQ ID NO: 123 - RNA, 1446 nt, synthetic construct
  source 1..1446: mol_type = other RNA
atggattggatttggagaatcctgttcctcgtgggcgccgctaccggagcccactcccagggcagactgtttcagtctggcgccgaagtgaaaagaccaggcgcctctgtgcggatcagctgcagagctgacgacgacccctacaccgacgacgataccttcaccaagtactggacccactggatcagacaggcccctggacaaagacctgagtggctgggagtgatcagccctcacttcgccagacctatctacagctacaagttccgggacagactgaccctgaccagagacagctctctgaccgccgtgtacctggaactgaagggcctgcagcctgacgacagcggcatctacttttgcgccagagatcccttcggcgacagagcccctcactacaactaccacatggacgtgtggggcggaggcacagccgtgatagttagcagcgcctctacaaagggccctagcgtgttccctctggctcctagcagcaagtcgacatctggcggaacagccgctctgggctgtctggtcaaggactactttcccgagcctgtgacagtgtcctggaactctggcgctctgacaagcggcgtgcacacatttccagccgtgctgcaaagcagcggcctgtactctctgagcagcgtggtcacagtgccaagctctagcctgggcacccagacctacatctgcaatgtgaaccacaagcctagcaacaccaaggtggacaagagagtggaacccaagagctgcgacaagacccacacctgtcctccatgtcctgctccagaactgctggccggaccttccgtgttcctgtttcctccaaagcctaaggacaccctgatgatcagcagaacccctgaagtgacctgcgtggtggtggatgtgtctcacgaggaccctgaagtgaagttcaattggtacgtggacggcgtggaagtgcacaacgccaagaccaagcctagagaggaacagtacaacagcacctacagagtggtgtccgtgctgaccgtgctgcaccaggattggctgaacggcaaagagtacaagtgcaaggtgtccaacaaggccctgcctgcccctatcgaaaagaccatcagcaaggccaagggccagcctcgcgaacctcaagtctgtacactgcctcctagccgcgaggaaatgaccaagaaccaggtgtccctgagctgcgccgtgaagggcttttacccttccgatatcgccgtggaatgggagagcaatggccagcctgagaacaactacaagacaacccctcctgtgctggacagcgacggctcattcttcctggtgtccaagctgacagtggacaagagcagatggcagcagggcaacgtgttcagctgcagcgtgctgcatgaagccctgcacagccactacacccagaagtccctgtctctgagccccggcaagtgataa

SEQ ID NO: 124 - RNA, 1446 nt, synthetic construct
  source 1..1446: mol_type = other RNA
atggattggatttggagaatcctgttcctcgtgggcgccgctaccggagcccactcccagggcagactgtttcagtctggcgccgaagtgaaaagaccaggcgcctctgtgcggatcagctgcagagctgacgacgacccctacaccgacgacgataccttcaccaagtactggacccactggatcagacaggcccctggacaaagacctgagtggctgggagtgatcagccctcacttcgccagacctatctacagctacaagttccgggacagactgaccctgaccagagacagctctctgaccgccgtgtacctggaactgaagggcctgcagcctgacgacagcggcatctacttttgcgccagagatcccttcggcgacagagcccctcactacaactaccacatggacgtgtggggcggaggcacagccgtgatagttagcagcgcctctacaaagggccctagcgtgttccctctggctcctagcagcaagtcgacatctggcggaacagccgctctgggctgtctggtcaaggactactttcccgagcctgtgacagtgtcctggaactctggcgctctgacaagcggcgtgcacacatttccagccgtgctgcaaagcagcggcctgtactctctgagcagcgtggtcacagtgccaagctctagcctgggcacccagacctacatctgcaatgtgaaccacaagcctagcaacaccaaggtggacaagagagtggaacccaagagctgcgacaagacccacacctgtcctccatgtcctgctccagaactgctgggcggaccttccgtgttcctgtttcctccaaagcctaaggacaccctgatgatcagcagaacccctgaagtgacctgcgtggtggtggatgtgtctcacgaggaccctgaagtgaagttcaattggtacgtggacggcgtggaagtgcacaacgccaagaccaagcctagagaggaacagtacaacagcacctacagagtggtgtccgtgctgaccgtgctgcaccaggattggctgaacggcaaagagtacaagtgcaaggtgtccaacaaggccctgcctgcccctgaggaaaagaccatcagcaaggccaagggccagcctcgcgaacctcaagtctgtacactgcctcctagccgcgaggaaatgaccaagaaccaggtgtccctgagctgcgccgtgaagggcttttacccttccgatatcgccgtggaatgggagagcaatggccagcctgagaacaactacaagacaacccctcctgtgctggacagcgacggctcattcttcctggtgtccaagctgacagtggacaagagcagatggcagcagggcaacgtgttcagctgcagcgtgctgcatgaagccctgcacagccactacacccagaagtccctgtctctgagccccggcaagtgataa

SEQ ID NO: 125 - RNA, 1446 nt, synthetic construct
  source 1..1446: mol_type = other RNA
atggattggatttggagaatcctgttcctcgtgggcgccgctaccggagcccactcccagggcagactgtttcagtctggcgccgaagtgaaaagaccaggcgcctctgtgcggatcagctgcagagctgacgacgacccctacaccgacgacgataccttcaccaagtactggacccactggatcagacaggcccctggacaaagacctgagtggctgggagtgatcagccctcacttcgccagacctatctacagctacaagttccgggacagactgaccctgaccagagacagctctctgaccgccgtgtacctggaactgaagggcctgcagcctgacgacagcggcatctacttttgcgccagagatcccttcggcgacagagcccctcactacaactaccacatggacgtgtggggcggaggcacagccgtgatagttagcagcgcctctacaaagggccctagcgtgttccctctggctcctagcagcaagtcgacatctggcggaacagccgctctgggctgtctggtcaaggactactttcccgagcctgtgacagtgtcctggaactctggcgctctgacaagcggcgtgcacacatttccagccgtgctgcaaagcagcggcctgtactctctgagcagcgtggtcacagtgccaagctctagcctgggcacccagacctacatctgcaatgtgaaccacaagcctagcaacaccaaggtggacaagagagtggaacccaagagctgcgacaagacccacacctgtcctccatgtcctgctccagaactgctggccggaccttccgtgttcctgtttcctccaaagcctaaggacaccctgatgatcagcagaacccctgaagtgacctgcgtggtggtggatgtgtctcacgaggaccctgaagtgaagttcaattggtacgtggacggcgtggaagtgcacaacgccaagaccaagcctagagaggaacagtacaacagcacctacagagtggtgtccgtgctgaccgtgctgcaccaggattggctgaacggcaaagagtacaagtgcaaggtgtccaacaaggccctgcctctgcctgaggaaaagaccatcagcaaggccaagggccagcctagggaaccccaggtttacaccctgcctccatgccgcgaggaaatgaccaagaaccaggtgtccctgtggtgcctggtcaagggcttctacccttccgatatcgccgtggaatgggagagcaatggccagcctgagaacaactacaagacaacccctcctgtgctggacagcgacggctcattcttcctgtacagcaagctgacagtggacaagagcagatggcagcagggcaacgtgttcagctgcagcgtgctgcatgaagccctgcacagccactacacccagaagtccctgtctctgagccccggcaagtgataa

SEQ ID NO: 126 - RNA, 1446 nt, synthetic construct
  source 1..1446: mol_type = other RNA
atggattggatttggagaatcctgttcctcgtgggcgccgctaccggagcccactcccagggcagactgtttcagtctggcgccgaagtgaaaagaccaggcgcctctgtgcggatcagctgcagagctgacgacgacccctacaccgacgacgataccttcaccaagtactggacccactggatcagacaggcccctggacaaagacctgagtggctgggagtgatcagccctcacttcgccagacctatctacagctacaagttccgggacagactgaccctgaccagagacagctctctgaccgccgtgtacctggaactgaagggcctgcagcctgacgacagcggcatctacttttgcgccagagatcccttcggcgacagagcccctcactacaactaccacatggacgtgtggggcggaggcacagccgtgatagttagcagcgcctctacaaagggccctagcgtgttccctctggctcctagcagcaagtcgacatctggcggaacagccgctctgggctgtctggtcaaggactactttcccgagcctgtgacagtgtcctggaactctggcgctctgacaagcggcgtgcacacatttccagccgtgctgcaaagcagcggcctgtactctctgagcagcgtggtcacagtgccaagctctagcctgggcacccagacctacatctgcaatgtgaaccacaagcctagcaacaccaaggtggacaagagagtggaacccaagagctgcgacaagacccacacctgtcctccatgtcctgctccagaactgctggccggaccttccgtgttcctgtttcctccaaagcctaaggacaccctgatgatcagcagaacccctgaagtgacctgcgtggtggtggatgtgtctcacgaggaccctgaagtgaagttcaattggtacgtggacggcgtggaagtgcacaacgccaagaccaagcctagagaggaacagtacaacagcacctacagagtggtgtccgtgctgaccgtgctgcaccaggattggctgaacggcaaagagtacaagtgcaaggtgtccaacaaggccctgcctgcccctgaggaaaagaccatcagcaaggccaagggccagcctagggaaccccaggtttacaccctgcctccatgccgcgaggaaatgaccaagaaccaggtgtccctgtggtgcctggtcaagggcttctacccttccgatatcgccgtggaatgggagagcaatggccagcctgagaacaactacaagacaacccctcctgtgctggacagcgacggctcattcttcctgtacagcaagctgacagtggacaagagcagatggcagcagggcaacgtgttcagctgcagcgtgctgcatgaagccctgcacagccactacacccagaagtccctgtctctgagccccggcaagtgataa

SEQ ID NO: 127 - RNA, 1446 nt, synthetic construct
  source 1..1446: mol_type = other RNA
atggattggatttggagaatcctgttcctcgtgggcgccgctaccggagcccactcccagggcagactgtttcagtctggcgccgaagtgaaaagaccaggcgcctctgtgcggatcagctgcagagctgacgacgacccctacaccgacgacgataccttcaccaagtactggacccactggatcagacaggcccctggacaaagacctgagtggctgggagtgatcagccctcacttcgccagacctatctacagctacaagttccgggacagactgaccctgaccagagacagctctctgaccgccgtgtacctggaactgaagggcctgcagcctgacgacagcggcatctacttttgcgccagagatcccttcggcgacagagcccctcactacaactaccacatggacgtgtggggcggaggcacagccgtgatagttagcagcgcctctacaaagggccctagcgtgttccctctggctcctagcagcaagtcgacatctggcggaacagccgctctgggctgtctggtcaaggactactttcccgagcctgtgacagtgtcctggaactctggcgctctgacaagcggcgtgcacacatttccagccgtgctgcaaagcagcggcctgtactctctgagcagcgtggtcacagtgccaagctctagcctgggcacccagacctacatctgcaatgtgaaccacaagcctagcaacaccaaggtggacaagagagtggaacccaagagctgcgacaagacccacacctgtcctccatgtcctgctccagaactgctggccggaccttccgtgttcctgtttcctccaaagcctaaggacaccctgatgatcagcagaacccctgaagtgacctgcgtggtggtggatgtgtctcacgaggaccctgaagtgaagttcaattggtacgtggacggcgtggaagtgcacaacgccaagaccaagcctagagaggaacagtacaacagcacctacagagtggtgtccgtgctgaccgtgctgcaccaggattggctgaacggcaaagagtacaagtgcaaggtgtccaacaaggccctgcctgcccctatcgaaaagaccatcagcaaggccaagggccagcctagggaaccccaggtttacaccctgcctccatgccgcgaggaaatgaccaagaaccaggtgtccctgtggtgcctggtcaagggcttctacccttccgatatcgccgtggaatgggagagcaatggccagcctgagaacaactacaagacaacccctcctgtgctggacagcgacggctcattcttcctgtacagcaagctgacagtggacaagagcagatggcagcagggcaacgtgttcagctgcagcgtgctgcatgaagccctgcacagccactacacccagaagtccctgtctctgagccccggcaagtgataa

SEQ ID NO: 128 - RNA, 1446 nt, synthetic construct
  source 1..1446: mol_type = other RNA
atggattggatttggagaatcctgttcctcgtgggcgccgctaccggagcccactcccagggcagactgtttcagtctggcgccgaagtgaaaagaccaggcgcctctgtgcggatcagctgcagagctgacgacgacccctacaccgacgacgataccttcaccaagtactggacccactggatcagacaggcccctggacaaagacctgagtggctgggagtgatcagccctcacttcgccagacctatctacagctacaagttccgggacagactgaccctgaccagagacagctctctgaccgccgtgtacctggaactgaagggcctgcagcctgacgacagcggcatctacttttgcgccagagatcccttcggcgacagagcccctcactacaactaccacatggacgtgtggggcggaggcacagccgtgatagttagcagcgcctctacaaagggccctagcgtgttccctctggctcctagcagcaagtcgacatctggcggaacagccgctctgggctgtctggtcaaggactactttcccgagcctgtgacagtgtcctggaactctggcgctctgacaagcggcgtgcacacatttccagccgtgctgcaaagcagcggcctgtactctctgagcagcgtggtcacagtgccaagctctagcctgggcacccagacctacatctgcaatgtgaaccacaagcctagcaacaccaaggtggacaagagagtggaacccaagagctgcgacaagacccacacctgtcctccatgtcctgctccagaactgctgggcggaccttccgtgttcctgtttcctccaaagcctaaggacaccctgatgatcagcagaacccctgaagtgacctgcgtggtggtggatgtgtctcacgaggaccctgaagtgaagttcaattggtacgtggacggcgtggaagtgcacaacgccaagaccaagcctagagaggaacagtacaacagcacctacagagtggtgtccgtgctgaccgtgctgcaccaggattggctgaacggcaaagagtacaagtgcaaggtgtccaacaaggccctgcctgcccctgaggaaaagaccatcagcaaggccaagggccagcctagggaaccccaggtttacaccctgcctccatgccgcgaggaaatgaccaagaaccaggtgtccctgtggtgcctggtcaagggcttctacccttccgatatcgccgtggaatgggagagcaatggccagcctgagaacaactacaagacaacccctcctgtgctggacagcgacggctcattcttcctgtacagcaagctgacagtggacaagagcagatggcagcagggcaacgtgttcagctgcagcgtgctgcatgaagccctgcacagccactacacccagaagtccctgtctctgagccccggcaagtgataa

SEQ ID NO: 129 - RNA, 1446 nt, synthetic construct
  source 1..1446: mol_type = other RNA
atggattggatttggagaatcctgttcctcgtgggcgccgctaccggagcccactcccagggcagactgtttcagtctggcgccgaagtgaaaagaccaggcgcctctgtgcggatcagctgcagagctgacgacgacccctacaccgacgacgataccttcaccaagtactggacccactggatcagacaggcccctggacaaagacctgagtggctgggagtgatcagccctcacttcgccagacctatctacagctacaagttccgggacagactgaccctgaccagagacagctctctgaccgccgtgtacctggaactgaagggcctgcagcctgacgacagcggcatctacttttgcgccagagatcccttcggcgacagagcccctcactacaactaccacatggacgtgtggggcggaggcacagccgtgatagttagcagcgcctctacaaagggccctagcgtgttccctctggctcctagcagcaagtcgacatctggcggaacagccgctctgggctgtctggtcaaggactactttcccgagcctgtgacagtgtcctggaactctggcgctctgacaagcggcgtgcacacatttccagccgtgctgcaaagcagcggcctgtactctctgagcagcgtggtcacagtgccaagctctagcctgggcacccagacctacatctgcaatgtgaaccacaagcctagcaacaccaaggtggacaagaaggtggaacccaagagctgcgacaagacccacacctgtcctccatgtcctgctccagaactgctcggcggaccttccgtgttcctgtttcctccaaagcctaaggacaccctgatgatcagcagaacccctgaagtgacctgcgtggtggtggatgtgtctcacgaggacccagaagtgaagttcaattggtacgtggacggcgtggaagtgcacaacgccaagaccaagcctagagaggaacagtacaacagcacctacagagtggtgtccgtgctgacagtgctgcaccaggattggctgaacggcaaagagtacaagtgcaaggtgtccaacaaggccctgcctgctcctatcgagaaaaccatcagcaaggccaagggccagcctagggaaccccaggtttacacactgcctccaagccgcgaggaaatgaccaagaaccaggtgtccctgacctgcctcgtgaagggcttctacccttccgatatcgccgtggaatgggagagcaatggccagcctgagaacaactacaagacaacccctcctgtgctggacagcgacggctcattcttcctgtacagcaagctgactgtggataagtcccggtggcagcagggcaacgtgttcagctgttctgtgatgcacgaagccctgcacaaccactacacccagaaaagcctgtctctgagccccggcaagtgataa

SEQ ID NO: 130 - RNA, 1446 nt, synthetic construct
  source 1..1446: mol_type = other RNA
atggattggatttggagaatcctgttcctcgtgggcgccgctaccggagcccactcccagggcagactgtttcagtctggcgccgaagtgaaaagaccaggcgcctctgtgcggatcagctgcagagctgacgacgacccctacaccgacgacgataccttcaccaagtactggacccactggatcagacaggcccctggacaaagacctgagtggctgggagtgatcagccctcacttcgccagacctatctacagctacaagttccgggacagactgaccctgaccagagacagctctctgaccgccgtgtacctggaactgaagggcctgcagcctgacgacagcggcatctacttttgcgccagagatcccttcggcgacagagcccctcactacaactaccacatggacgtgtggggcggaggcacagccgtgatagttagcagcgcctctacaaagggccctagcgtgttccctctggctcctagcagcaagtcgacatctggcggaacagccgctctgggctgtctggtcaaggactactttcccgagcctgtgacagtgtcctggaactctggcgctctgacaagcggcgtgcacacatttccagccgtgctgcaaagcagcggcctgtactctctgagcagcgtggtcacagtgccaagctctagcctgggcacccagacctacatctgcaatgtgaaccacaagcctagcaacaccaaggtggacaagaaggtggaacccaagagctgcgacaagacccacacctgtcctccatgtcctgctccagaactgctcggcggaccttccgtgttcctgtttcctccaaagcctaaggacaccctgatgatcagcagaacccctgaagtgacctgcgtggtggtggatgtgtctcacgaggacccagaagtgaagttcaattggtacgtggacggcgtggaagtgcacaacgccaagaccaagcctagagaggaacagtacaacagcacctacagagtggtgtccgtgctgacagtgctgcaccaggattggctgaacggcaaagagtacaagtgcaaggtgtccaacaaggccctgcctgctcctatcgagaaaaccatcagcaaggccaagggccagcctagggaaccccaggtttacacactgcctccaagccgcgaggaaatgaccaagaaccaggtgtccctgacctgcctcgtgaagggcttctacccttccgatatcgccgtggaatgggagagcaatggccagcctgagaacaactacaagacaacccctcctgtgctggacagcgacggctcattcttcctgtacagcaagctgaccgtggacaagtccagatggcagcagggcaacgtgttcagctgtagcgtgctgcacgaagccctgcacagccactacacccagaaaagcctgtctctgagccccggcaaatgataa

SEQ ID NO: 131 - RNA, 1446 nt, synthetic construct
  source 1..1446: mol_type = other RNA
atggattggatttggagaatcctgttcctcgtgggcgccgctaccggagcccactcccagggcagactgtttcagtctggcgccgaagtgaaaagaccaggcgcctctgtgcggatcagctgcagagctgacgacgacccctacaccgacgacgataccttcaccaagtactggacccactggatcagacaggcccctggacaaagacctgagtggctgggagtgatcagccctcacttcgccagacctatctacagctacaagttccgggacagactgaccctgaccagagacagctctctgaccgccgtgtacctggaactgaagggcctgcagcctgacgacagcggcatctacttttgcgccagagatcccttcggcgacagagcccctcactacaactaccacatggacgtgtggggcggaggcacagccgtgatagttagcagcgcctctacaaagggccctagcgtgttccctctggctcctagcagcaagtcgacatctggcggaacagccgctctgggctgtctggtcaaggactactttcccgagcctgtgacagtgtcctggaactctggcgctctgacaagcggcgtgcacacatttccagccgtgctgcaaagcagcggcctgtactctctgagcagcgtggtcacagtgccaagctctagcctgggcacccagacctacatctgcaatgtgaaccacaagcctagcaacaccaaggtggacaagaaggtggaacccaagagctgcgacaagacccacacctgtcctccatgtcctgctccagaactgctcggcggaccttccgtgttcctgtttcctccaaagcctaaggacaccctgatgatcagcagaacccctgaagtgacctgcgtggtggtggatgtgtctcacgaggacccagaagtgaagttcaattggtacgtggacggcgtggaagtgcacaacgccaagaccaagcctagagaggaacagtacaacagcacctacagagtggtgtccgtgctgacagtgctgcaccaggattggctgaacggcaaagagtacaagtgcaaggtgtccaacaaggccctgcctgctcctatcgagaaaaccatcagcaaggccaagggccagcctcgcgaacctcaagtctgtacactgcctcctagccgcgaggaaatgaccaagaaccaggtgtccctgagctgcgccgtgaagggcttttacccttccgatatcgccgtggaatgggagagcaatggccagcctgagaacaactacaagacaacccctcctgtgctggacagcgacggctcattcttcctggtgtccaagctgacagtggacaagagcagatggcagcagggcaacgtgttcagctgcagcgtgctgcatgaagccctgcacagccactacacccagaagtccctgtctctgagccccggcaagtgataa

SEQ ID NO: 132 - RNA, 1446 nt, synthetic construct
  source 1..1446: mol_type = other RNA
atggattggatttggagaatcctgttcctcgtgggcgccgctaccggagcccactcccagggcagactgtttcagtctggcgccgaagtgaaaagaccaggcgcctctgtgcggatcagctgcagagctgacgacgacccctacaccgacgacgataccttcaccaagtactggacccactggatcagacaggcccctggacaaagacctgagtggctgggagtgatcagccctcacttcgccagacctatctacagctacaagttccgggacagactgaccctgaccagagacagctctctgaccgccgtgtacctggaactgaagggcctgcagcctgacgacagcggcatctacttttgcgccagagatcccttcggcgacagagcccctcactacaactaccacatggacgtgtggggcggaggcacagccgtgatagttagcagcgcctctacaaagggccctagcgtgttccctctggctcctagcagcaagtcgacatctggcggaacagccgctctgggctgtctggtcaaggactactttcccgagcctgtgacagtgtcctggaactctggcgctctgacaagcggcgtgcacacatttccagccgtgctgcaaagcagcggcctgtactctctgagcagcgtggtcacagtgccaagctctagcctgggcacccagacctacatctgcaatgtgaaccacaagcctagcaacaccaaggtggacaagaaggtggaacccaagagctgcgacaagacccacacctgtcctccatgtcctgctccagaactgctcggcggaccttccgtgttcctgtttcctccaaagcctaaggacaccctgatgatcagcagaacccctgaagtgacctgcgtggtggtggatgtgtctcacgaggacccagaagtgaagttcaattggtacgtggacggcgtggaagtgcacaacgccaagaccaagcctagagaggaacagtacaacagcacctacagagtggtgtccgtgctgacagtgctgcaccaggattggctgaacggcaaagagtacaagtgcaaggtgtccaacaaggccctgcctgctcctatcgagaaaaccatcagcaaggccaagggccagcctagggaaccccaggtttacaccctgcctccatgccgcgaggaaatgaccaagaaccaggtgtccctgtggtgcctggtcaagggcttctacccttccgatatcgccgtggaatgggagagcaatggccagcctgagaacaactacaagacaacccctcctgtgctggacagcgacggctcattcttcctgtacagcaagctgacagtggacaagagcagatggcagcagggcaacgtgttcagctgcagcgtgctgcatgaagccctgcacagccactacacccagaagtccctgtctctgagccccggcaagtgataa

SEQ ID NO: 133 - RNA, 1446 nt, synthetic construct
  source 1..1446: mol_type = other RNA
atggattggatttggagaatcctgttcctcgtgggcgccgctaccggagcccactcccagggcagactgtttcagtctggcgccgaagtgaaaagaccaggcgcctctgtgcggatcagctgcagagctgacgacgacccctacaccgacgacgataccttcaccaagtactggacccactggatcagacaggcccctggacaaagacctgagtggctgggagtgatcagccctcacttcgccagacctatctacagctacaagttccgggacagactgaccctgaccagagacagctctctgaccgccgtgtacctggaactgaagggcctgcagcctgacgacagcggcatctacttttgcgccagagatcccttcggcgacagagcccctcactacaactaccacatggacgtgtggggcggaggcacagccgtgatagttagcagcgcctctacaaagggccctagcgtgttccctctggctcctagcagcaagtcgacatctggcggaacagccgctctgggctgtctggtcaaggactactttcccgagcctgtgacagtgtcctggaactctggcgctctgacaagcggcgtgcacacatttccagccgtgctgcaaagcagcggcctgtactctctgagcagcgtggtcacagtgccaagctctagcctgggcacccagacctacatctgcaatgtgaaccacaagcctagcaacaccaaggtggacaagaaggtggaacccaagagctgcgacaagacccacacctgtcctccatgtcctgctccagaactgctggccggaccttccgtgttcctgtttcctccaaagcctaaggacaccctgatgatcagcagaacccctgaagtgacctgcgtggtggtggatgtgtctcacgaggaccctgaagtgaagttcaattggtacgtggacggcgtggaagtgcacaacgccaagaccaagcctagagaggaacagtacaacagcacctacagagtggtgtccgtgctgaccgtgctgcaccaggattggctgaacggcaaagagtacaagtgcaaggtgtccaacaaggccctgcctctgcctgaggaaaagaccatcagcaaggccaagggccagcctagggaaccccaggtttacacactgcctccaagccgcgaggaaatgaccaagaaccaggtgtccctgacctgcctcgtgaagggcttctacccttccgatatcgccgtggaatgggagagcaatggccagcctgagaacaactacaagacaacccctcctgtgctggacagcgacggctcattcttcctgtacagcaagctgaccgtggacaagtccagatggcagcagggcaacgtgttcagctgtagcgtgctgcacgaagccctgcacagccactacacccagaaaagcctgtctctgagccccggcaaatgataa

SEQ ID NO: 134 - RNA, 1446 nt, synthetic construct
  source 1..1446: mol_type = other RNA
atggattggatttggagaatcctgttcctcgtgggcgccgctaccggagcccactcccagggcagactgtttcagtctggcgccgaagtgaaaagaccaggcgcctctgtgcggatcagctgcagagctgacgacgacccctacaccgacgacgataccttcaccaagtactggacccactggatcagacaggcccctggacaaagacctgagtggctgggagtgatcagccctcacttcgccagacctatctacagctacaagttccgggacagactgaccctgaccagagacagctctctgaccgccgtgtacctggaactgaagggcctgcagcctgacgacagcggcatctacttttgcgccagagatcccttcggcgacagagcccctcactacaactaccacatggacgtgtggggcggaggcacagccgtgatagttagcagcgcctctacaaagggccctagcgtgttccctctggctcctagcagcaagtcgacatctggcggaacagccgctctgggctgtctggtcaaggactactttcccgagcctgtgacagtgtcctggaactctggcgctctgacaagcggcgtgcacacatttccagccgtgctgcaaagcagcggcctgtactctctgagcagcgtggtcacagtgccaagctctagcctgggcacccagacctacatctgcaatgtgaaccacaagcctagcaacaccaaggtggacaagaaggtggaacccaagagctgcgacaagacccacacctgtcctccatgtcctgctccagaactgctggccggaccttccgtgttcctgtttcctccaaagcctaaggacaccctgatgatcagcagaacccctgaagtgacctgcgtggtggtggatgtgtctcacgaggaccctgaagtgaagttcaattggtacgtggacggcgtggaagtgcacaacgccaagaccaagcctagagaggaacagtacaacagcacctacagagtggtgtccgtgctgaccgtgctgcaccaggattggctgaacggcaaagagtacaagtgcaaggtgtccaacaaggccctgcctgcccctgaggaaaagaccatcagcaaggccaagggccagcctagggaaccccaggtttacacactgcctccaagccgcgaggaaatgaccaagaaccaggtgtccctgacctgcctcgtgaagggcttctacccttccgatatcgccgtggaatgggagagcaatggccagcctgagaacaactacaagacaacccctcctgtgctggacagcgacggctcattcttcctgtacagcaagctgaccgtggacaagtccagatggcagcagggcaacgtgttcagctgtagcgtgctgcacgaagccctgcacagccactacacccagaaaagcctgtctctgagccccggcaaatgataa

SEQ ID NO: 135 - RNA, 1446 nt, synthetic construct
  source 1..1446: mol_type = other RNA
atggattggatttggagaatcctgttcctcgtgggcgccgctaccggagcccactcccagggcagactgtttcagtctggcgccgaagtgaaaagaccaggcgcctctgtgcggatcagctgcagagctgacgacgacccctacaccgacgacgataccttcaccaagtactggacccactggatcagacaggcccctggacaaagacctgagtggctgggagtgatcagccctcacttcgccagacctatctacagctacaagttccgggacagactgaccctgaccagagacagctctctgaccgccgtgtacctggaactgaagggcctgcagcctgacgacagcggcatctacttttgcgccagagatcccttcggcgacagagcccctcactacaactaccacatggacgtgtggggcggaggcacagccgtgatagttagcagcgcctctacaaagggccctagcgtgttccctctggctcctagcagcaagtcgacatctggcggaacagccgctctgggctgtctggtcaaggactactttcccgagcctgtgacagtgtcctggaactctggcgctctgacaagcggcgtgcacacatttccagccgtgctgcaaagcagcggcctgtactctctgagcagcgtggtcacagtgccaagctctagcctgggcacccagacctacatctgcaatgtgaaccacaagcctagcaacaccaaggtggacaagaaggtggaacccaagagctgcgacaagacccacacctgtcctccatgtcctgctccagaactgctggccggaccttccgtgttcctgtttcctccaaagcctaaggacaccctgatgatcagcagaacccctgaagtgacctgcgtggtggtggatgtgtctcacgaggaccctgaagtgaagttcaattggtacgtggacggcgtggaagtgcacaacgccaagaccaagcctagagaggaacagtacaacagcacctacagagtggtgtccgtgctgaccgtgctgcaccaggattggctgaacggcaaagagtacaagtgcaaggtgtccaacaaggccctgcctgcccctatcgaaaagaccatcagcaaggccaagggccagcctagggaaccccaggtttacacactgcctccaagccgcgaggaaatgaccaagaaccaggtgtccctgacctgcctcgtgaagggcttctacccttccgatatcgccgtggaatgggagagcaatggccagcctgagaacaactacaagacaacccctcctgtgctggacagcgacggctcattcttcctgtacagcaagctgaccgtggacaagtccagatggcagcagggcaacgtgttcagctgtagcgtgctgcacgaagccctgcacagccactacacccagaaaagcctgtctctgagccccggcaaatgataa

SEQ ID NO: 136 - RNA, 1446 nt, synthetic construct
  source 1..1446: mol_type = other RNA
atggattggatttggagaatcctgttcctcgtgggcgccgctaccggagcccactcccagggcagactgtttcagtctggcgccgaagtgaaaagaccaggcgcctctgtgcggatcagctgcagagctgacgacgacccctacaccgacgacgataccttcaccaagtactggacccactggatcagacaggcccctggacaaagacctgagtggctgggagtgatcagccctcacttcgccagacctatctacagctacaagttccgggacagactgaccctgaccagagacagctctctgaccgccgtgtacctggaactgaagggcctgcagcctgacgacagcggcatctacttttgcgccagagatcccttcggcgacagagcccctcactacaactaccacatggacgtgtggggcggaggcacagccgtgatagttagcagcgcctctacaaagggccctagcgtgttccctctggctcctagcagcaagtcgacatctggcggaacagccgctctgggctgtctggtcaaggactactttcccgagcctgtgacagtgtcctggaactctggcgctctgacaagcggcgtgcacacatttccagccgtgctgcaaagcagcggcctgtactctctgagcagcgtggtcacagtgccaagctctagcctgggcacccagacctacatctgcaatgtgaaccacaagcctagcaacaccaaggtggacaagaaggtggaacccaagagctgcgacaagacccacacctgtcctccatgtcctgctccagaactgctgggcggaccttccgtgttcctgtttcctccaaagcctaaggacaccctgatgatcagcagaacccctgaagtgacctgcgtggtggtggatgtgtctcacgaggaccctgaagtgaagttcaattggtacgtggacggcgtggaagtgcacaacgccaagaccaagcctagagaggaacagtacaacagcacctacagagtggtgtccgtgctgaccgtgctgcaccaggattggctgaacggcaaagagtacaagtgcaaggtgtccaacaaggccctgcctgcccctgaggaaaagaccatcagcaaggccaagggccagcctagggaaccccaggtttacacactgcctccaagccgcgaggaaatgaccaagaaccaggtgtccctgacctgcctcgtgaagggcttctacccttccgatatcgccgtggaatgggagagcaatggccagcctgagaacaactacaagacaacccctcctgtgctggacagcgacggctcattcttcctgtacagcaagctgaccgtggacaagtccagatggcagcagggcaacgtgttcagctgtagcgtgctgcacgaagccctgcacagccactacacccagaaaagcctgtctctgagccccggcaaatgataa

SEQ ID NO: 137 - RNA, 1446 nt, synthetic construct
  source 1..1446: mol_type = other RNA
atggattggatttggagaatcctgttcctcgtgggcgccgctaccggagcccactcccagggcagactgtttcagtctggcgccgaagtgaaaagaccaggcgcctctgtgcggatcagctgcagagctgacgacgacccctacaccgacgacgataccttcaccaagtactggacccactggatcagacaggcccctggacaaagacctgagtggctgggagtgatcagccctcacttcgccagacctatctacagctacaagttccgggacagactgaccctgaccagagacagctctctgaccgccgtgtacctggaactgaagggcctgcagcctgacgacagcggcatctacttttgcgccagagatcccttcggcgacagagcccctcactacaactaccacatggacgtgtggggcggaggcacagccgtgatagttagcagcgcctctacaaagggccctagcgtgttccctctggctcctagcagcaagtcgacatctggcggaacagccgctctgggctgtctggtcaaggactactttcccgagcctgtgacagtgtcctggaactctggcgctctgacaagcggcgtgcacacatttccagccgtgctgcaaagcagcggcctgtactctctgagcagcgtggtcacagtgccaagctctagcctgggcacccagacctacatctgcaatgtgaaccacaagcctagcaacaccaaggtggacaagaaggtggaacccaagagctgcgacaagacccacacctgtcctccatgtcctgctccagaactgctggccggaccttccgtgttcctgtttcctccaaagcctaaggacaccctgatgatcagcagaacccctgaagtgacctgcgtggtggtggatgtgtctcacgaggaccctgaagtgaagttcaattggtacgtggacggcgtggaagtgcacaacgccaagaccaagcctagagaggaacagtacaacagcacctacagagtggtgtccgtgctgaccgtgctgcaccaggattggctgaacggcaaagagtacaagtgcaaggtgtccaacaaggccctgcctctgcctgaggaaaagaccatcagcaaggccaagggccagcctcgcgaacctcaagtctgtacactgcctcctagccgcgaggaaatgaccaagaaccaggtgtccctgagctgcgccgtgaagggcttttacccttccgatatcgccgtggaatgggagagcaatggccagcctgagaacaactacaagacaacccctcctgtgctggacagcgacggctcattcttcctggtgtccaagctgacagtggacaagagcagatggcagcagggcaacgtgttcagctgcagcgtgctgcatgaagccctgcacagccactacacccagaagtccctgtctctgagccccggcaagtgataa

SEQ ID NO: 138 - RNA, 1446 nt, synthetic construct
  source 1..1446: mol_type = other RNA
atggattggatttggagaatcctgttcctcgtgggcgccgctaccggagcccactcccagggcagactgtttcagtctggcgccgaagtgaaaagaccaggcgcctctgtgcggatcagctgcagagctgacgacgacccctacaccgacgacgataccttcaccaagtactggacccactggatcagacaggcccctggacaaagacctgagtggctgggagtgatcagccctcacttcgccagacctatctacagctacaagttccgggacagactgaccctgaccagagacagctctctgaccgccgtgtacctggaactgaagggcctgcagcctgacgacagcggcatctacttttgcgccagagatcccttcggcgacagagcccctcactacaactaccacatggacgtgtggggcggaggcacagccgtgatagttagcagcgcctctacaaagggccctagcgtgttccctctggctcctagcagcaagtcgacatctggcggaacagccgctctgggctgtctggtcaaggactactttcccgagcctgtgacagtgtcctggaactctggcgctctgacaagcggcgtgcacacatttccagccgtgctgcaaagcagcggcctgtactctctgagcagcgtggtcacagtgccaagctctagcctgggcacccagacctacatctgcaatgtgaaccacaagcctagcaacaccaaggtggacaagaaggtggaacccaagagctgcgacaagacccacacctgtcctccatgtcctgctccagaactgctggccggaccttccgtgttcctgtttcctccaaagcctaaggacaccctgatgatcagcagaacccctgaagtgacctgcgtggtggtggatgtgtctcacgaggaccctgaagtgaagttcaattggtacgtggacggcgtggaagtgcacaacgccaagaccaagcctagagaggaacagtacaacagcacctacagagtggtgtccgtgctgaccgtgctgcaccaggattggctgaacggcaaagagtacaagtgcaaggtgtccaacaaggccctgcctgcccctgaggaaaagaccatcagcaaggccaagggccagcctcgcgaacctcaagtctgtacactgcctcctagccgcgaggaaatgaccaagaaccaggtgtccctgagctgcgccgtgaagggcttttacccttccgatatcgccgtggaatgggagagcaatggccagcctgagaacaactacaagacaacccctcctgtgctggacagcgacggctcattcttcctggtgtccaagctgacagtggacaagagcagatggcagcagggcaacgtgttcagctgcagcgtgctgcatgaagccctgcacagccactacacccagaagtccctgtctctgagccccggcaagtgataa

SEQ ID NO: 139 - RNA, 1446 nt, synthetic construct
  source 1..1446: mol_type = other RNA
atggattggatttggagaatcctgttcctcgtgggcgccgctaccggagcccactcccagggcagactgtttcagtctggcgccgaagtgaaaagaccaggcgcctctgtgcggatcagctgcagagctgacgacgacccctacaccgacgacgataccttcaccaagtactggacccactggatcagacaggcccctggacaaagacctgagtggctgggagtgatcagccctcacttcgccagacctatctacagctacaagttccgggacagactgaccctgaccagagacagctctctgaccgccgtgtacctggaactgaagggcctgcagcctgacgacagcggcatctacttttgcgccagagatcccttcggcgacagagcccctcactacaactaccacatggacgtgtggggcggaggcacagccgtgatagttagcagcgcctctacaaagggccctagcgtgttccctctggctcctagcagcaagtcgacatctggcggaacagccgctctgggctgtctggtcaaggactactttcccgagcctgtgacagtgtcctggaactctggcgctctgacaagcggcgtgcacacatttccagccgtgctgcaaagcagcggcctgtactctctgagcagcgtggtcacagtgccaagctctagcctgggcacccagacctacatctgcaatgtgaaccacaagcctagcaacaccaaggtggacaagaaggtggaacccaagagctgcgacaagacccacacctgtcctccatgtcctgctccagaactgctggccggaccttccgtgttcctgtttcctccaaagcctaaggacaccctgatgatcagcagaacccctgaagtgacctgcgtggtggtggatgtgtctcacgaggaccctgaagtgaagttcaattggtacgtggacggcgtggaagtgcacaacgccaagaccaagcctagagaggaacagtacaacagcacctacagagtggtgtccgtgctgaccgtgctgcaccaggattggctgaacggcaaagagtacaagtgcaaggtgtccaacaaggccctgcctgcccctatcgaaaagaccatcagcaaggccaagggccagcctcgcgaacctcaagtctgtacactgcctcctagccgcgaggaaatgaccaagaaccaggtgtccctgagctgcgccgtgaagggcttttacccttccgatatcgccgtggaatgggagagcaatggccagcctgagaacaactacaagacaacccctcctgtgctggacagcgacggctcattcttcctggtgtccaagctgacagtggacaagagcagatggcagcagggcaacgtgttcagctgcagcgtgctgcatgaagccctgcacagccactacacccagaagtccctgtctctgagccccggcaagtgataa

SEQ ID NO: 140 - RNA, 1446 nt, synthetic construct
  source 1..1446: mol_type = other RNA
atggattggatttggagaatcctgttcctcgtgggcgccgctaccggagcccactcccagggcagactgtttcagtctggcgccgaagtgaaaagaccaggcgcctctgtgcggatcagctgcagagctgacgacgacccctacaccgacgacgataccttcaccaagtactggacccactggatcagacaggcccctggacaaagacctgagtggctgggagtgatcagccctcacttcgccagacctatctacagctacaagttccgggacagactgaccctgaccagagacagctctctgaccgccgtgtacctggaactgaagggcctgcagcctgacgacagcggcatctacttttgcgccagagatcccttcggcgacagagcccctcactacaactaccacatggacgtgtggggcggaggcacagccgtgatagttagcagcgcctctacaaagggccctagcgtgttccctctggctcctagcagcaagtcgacatctggcggaacagccgctctgggctgtctggtcaaggactactttcccgagcctgtgacagtgtcctggaactctggcgctctgacaagcggcgtgcacacatttccagccgtgctgcaaagcagcggcctgtactctctgagcagcgtggtcacagtgccaagctctagcctgggcacccagacctacatctgcaatgtgaaccacaagcctagcaacaccaaggtggacaagaaggtggaacccaagagctgcgacaagacccacacctgtcctccatgtcctgctccagaactgctgggcggaccttccgtgttcctgtttcctccaaagcctaaggacaccctgatgatcagcagaacccctgaagtgacctgcgtggtggtggatgtgtctcacgaggaccctgaagtgaagttcaattggtacgtggacggcgtggaagtgcacaacgccaagaccaagcctagagaggaacagtacaacagcacctacagagtggtgtccgtgctgaccgtgctgcaccaggattggctgaacggcaaagagtacaagtgcaaggtgtccaacaaggccctgcctgcccctgaggaaaagaccatcagcaaggccaagggccagcctcgcgaacctcaagtctgtacactgcctcctagccgcgaggaaatgaccaagaaccaggtgtccctgagctgcgccgtgaagggcttttacccttccgatatcgccgtggaatgggagagcaatggccagcctgagaacaactacaagacaacccctcctgtgctggacagcgacggctcattcttcctggtgtccaagctgacagtggacaagagcagatggcagcagggcaacgtgttcagctgcagcgtgctgcatgaagccctgcacagccactacacccagaagtccctgtctctgagccccggcaagtgataa

SEQ ID NO: 141 - RNA, 1446 nt, synthetic construct
  source 1..1446: mol_type = other RNA
atggattggatttggagaatcctgttcctcgtgggcgccgctaccggagcccactcccagggcagactgtttcagtctggcgccgaagtgaaaagaccaggcgcctctgtgcggatcagctgcagagctgacgacgacccctacaccgacgacgataccttcaccaagtactggacccactggatcagacaggcccctggacaaagacctgagtggctgggagtgatcagccctcacttcgccagacctatctacagctacaagttccgggacagactgaccctgaccagagacagctctctgaccgccgtgtacctggaactgaagggcctgcagcctgacgacagcggcatctacttttgcgccagagatcccttcggcgacagagcccctcactacaactaccacatggacgtgtggggcggaggcacagccgtgatagttagcagcgcctctacaaagggccctagcgtgttccctctggctcctagcagcaagtcgacatctggcggaacagccgctctgggctgtctggtcaaggactactttcccgagcctgtgacagtgtcctggaactctggcgctctgacaagcggcgtgcacacatttccagccgtgctgcaaagcagcggcctgtactctctgagcagcgtggtcacagtgccaagctctagcctgggcacccagacctacatctgcaatgtgaaccacaagcctagcaacaccaaggtggacaagaaggtggaacccaagagctgcgacaagacccacacctgtcctccatgtcctgctccagaactgctggccggaccttccgtgttcctgtttcctccaaagcctaaggacaccctgatgatcagcagaacccctgaagtgacctgcgtggtggtggatgtgtctcacgaggaccctgaagtgaagttcaattggtacgtggacggcgtggaagtgcacaacgccaagaccaagcctagagaggaacagtacaacagcacctacagagtggtgtccgtgctgaccgtgctgcaccaggattggctgaacggcaaagagtacaagtgcaaggtgtccaacaaggccctgcctctgcctgaggaaaagaccatcagcaaggccaagggccagcctagggaaccccaggtttacaccctgcctccatgccgcgaggaaatgaccaagaaccaggtgtccctgtggtgcctggtcaagggcttctacccttccgatatcgccgtggaatgggagagcaatggccagcctgagaacaactacaagacaacccctcctgtgctggacagcgacggctcattcttcctgtacagcaagctgacagtggacaagagcagatggcagcagggcaacgtgttcagctgcagcgtgctgcatgaagccctgcacagccactacacccagaagtccctgtctctgagccccggcaagtgataa

SEQ ID NO: 142 - RNA, 1446 nt, synthetic construct
  source 1..1446: mol_type = other RNA
atggattggatttggagaatcctgttcctcgtgggcgccgctaccggagcccactcccagggcagactgtttcagtctggcgccgaagtgaaaagaccaggcgcctctgtgcggatcagctgcagagctgacgacgacccctacaccgacgacgataccttcaccaagtactggacccactggatcagacaggcccctggacaaagacctgagtggctgggagtgatcagccctcacttcgccagacctatctacagctacaagttccgggacagactgaccctgaccagagacagctctctgaccgccgtgtacctggaactgaagggcctgcagcctgacgacagcggcatctacttttgcgccagagatcccttcggcgacagagcccctcactacaactaccacatggacgtgtggggcggaggcacagccgtgatagttagcagcgcctctacaaagggccctagcgtgttccctctggctcctagcagcaagtcgacatctggcggaacagccgctctgggctgtctggtcaaggactactttcccgagcctgtgacagtgtcctggaactctggcgctctgacaagcggcgtgcacacatttccagccgtgctgcaaagcagcggcctgtactctctgagcagcgtggtcacagtgccaagctctagcctgggcacccagacctacatctgcaatgtgaaccacaagcctagcaacaccaaggtggacaagaaggtggaacccaagagctgcgacaagacccacacctgtcctccatgtcctgctccagaactgctggccggaccttccgtgttcctgtttcctccaaagcctaaggacaccctgatgatcagcagaacccctgaagtgacctgcgtggtggtggatgtgtctcacgaggaccctgaagtgaagttcaattggtacgtggacggcgtggaagtgcacaacgccaagaccaagcctagagaggaacagtacaacagcacctacagagtggtgtccgtgctgaccgtgctgcaccaggattggctgaacggcaaagagtacaagtgcaaggtgtccaacaaggccctgcctgcccctgaggaaaagaccatcagcaaggccaagggccagcctagggaaccccaggtttacaccctgcctccatgccgcgaggaaatgaccaagaaccaggtgtccctgtggtgcctggtcaagggcttctacccttccgatatcgccgtggaatgggagagcaatggccagcctgagaacaactacaagacaacccctcctgtgctggacagcgacggctcattcttcctgtacagcaagctgacagtggacaagagcagatggcagcagggcaacgtgttcagctgcagcgtgctgcatgaagccctgcacagccactacacccagaagtccctgtctctgagccccggcaagtgataa

SEQ ID NO: 143 - RNA, 1446 nt, synthetic construct
  source 1..1446: mol_type = other RNA
atggattggatttggagaatcctgttcctcgtgggcgccgctaccggagcccactcccagggcagactgtttcagtctggcgccgaagtgaaaagaccaggcgcctctgtgcggatcagctgcagagctgacgacgacccctacaccgacgacgataccttcaccaagtactggacccactggatcagacaggcccctggacaaagacctgagtggctgggagtgatcagccctcacttcgccagacctatctacagctacaagttccgggacagactgaccctgaccagagacagctctctgaccgccgtgtacctggaactgaagggcctgcagcctgacgacagcggcatctacttttgcgccagagatcccttcggcgacagagcccctcactacaactaccacatggacgtgtggggcggaggcacagccgtgatagttagcagcgcctctacaaagggccctagcgtgttccctctggctcctagcagcaagtcgacatctggcggaacagccgctctgggctgtctggtcaaggactactttcccgagcctgtgacagtgtcctggaactctggcgctctgacaagcggcgtgcacacatttccagccgtgctgcaaagcagcggcctgtactctctgagcagcgtggtcacagtgccaagctctagcctgggcacccagacctacatctgcaatgtgaaccacaagcctagcaacaccaaggtggacaagaaggtggaacccaagagctgcgacaagacccacacctgtcctccatgtcctgctccagaactgctggccggaccttccgtgttcctgtttcctccaaagcctaaggacaccctgatgatcagcagaacccctgaagtgacctgcgtggtggtggatgtgtctcacgaggaccctgaagtgaagttcaattggtacgtggacggcgtggaagtgcacaacgccaagaccaagcctagagaggaacagtacaacagcacctacagagtggtgtccgtgctgaccgtgctgcaccaggattggctgaacggcaaagagtacaagtgcaaggtgtccaacaaggccctgcctgcccctatcgaaaagaccatcagcaaggccaagggccagcctagggaaccccaggtttacaccctgcctccatgccgcgaggaaatgaccaagaaccaggtgtccctgtggtgcctggtcaagggcttctacccttccgatatcgccgtggaatgggagagcaatggccagcctgagaacaactacaagacaacccctcctgtgctggacagcgacggctcattcttcctgtacagcaagctgacagtggacaagagcagatggcagcagggcaacgtgttcagctgcagcgtgctgcatgaagccctgcacagccactacacccagaagtccctgtctctgagccccggcaagtgataa

SEQ ID NO: 144 - RNA, 1446 nt, synthetic construct
  source 1..1446: mol_type = other RNA
atggattggatttggagaatcctgttcctcgtgggcgccgctaccggagcccactcccagggcagactgtttcagtctggcgccgaagtgaaaagaccaggcgcctctgtgcggatcagctgcagagctgacgacgacccctacaccgacgacgataccttcaccaagtactggacccactggatcagacaggcccctggacaaagacctgagtggctgggagtgatcagccctcacttcgccagacctatctacagctacaagttccgggacagactgaccctgaccagagacagctctctgaccgccgtgtacctggaactgaagggcctgcagcctgacgacagcggcatctacttttgcgccagagatcccttcggcgacagagcccctcactacaactaccacatggacgtgtggggcggaggcacagccgtgatagttagcagcgcctctacaaagggccctagcgtgttccctctggctcctagcagcaagtcgacatctggcggaacagccgctctgggctgtctggtcaaggactactttcccgagcctgtgacagtgtcctggaactctggcgctctgacaagcggcgtgcacacatttccagccgtgctgcaaagcagcggcctgtactctctgagcagcgtggtcacagtgccaagctctagcctgggcacccagacctacatctgcaatgtgaaccacaagcctagcaacaccaaggtggacaagaaggtggaacccaagagctgcgacaagacccacacctgtcctccatgtcctgctccagaactgctgggcggaccttccgtgttcctgtttcctccaaagcctaaggacaccctgatgatcagcagaacccctgaagtgacctgcgtggtggtggatgtgtctcacgaggaccctgaagtgaagttcaattggtacgtggacggcgtggaagtgcacaacgccaagaccaagcctagagaggaacagtacaacagcacctacagagtggtgtccgtgctgaccgtgctgcaccaggattggctgaacggcaaagagtacaagtgcaaggtgtccaacaaggccctgcctgcccctgaggaaaagaccatcagcaaggccaagggccagcctagggaaccccaggtttacaccctgcctccatgccgcgaggaaatgaccaagaaccaggtgtccctgtggtgcctggtcaagggcttctacccttccgatatcgccgtggaatgggagagcaatggccagcctgagaacaactacaagacaacccctcctgtgctggacagcgacggctcattcttcctgtacagcaagctgacagtggacaagagcagatggcagcagggcaacgtgttcagctgcagcgtgctgcatgaagccctgcacagccactacacccagaagtccctgtctctgagccccggcaagtgataa

SEQ ID NO: 145 - RNA, 1446 nt, synthetic construct
  source 1..1446: mol_type = other RNA
atggattggatttggagaatcctgttcctcgtgggcgccgctaccggagcccactcccagggcagactgtttcagtctggcgccgaagtgaaaagaccaggcgcctctgtgcggatcagctgcagagctgacgacgacccctacaccgacgacgataccttcaccaagtactggacccactggatcagacaggcccctggacaaagacctgagtggctgggagtgatcagccctcacttcgccagacctatctacagctacaagttccgggacagactgaccctgaccagagacagctctctgaccgccgtgtacctggaactgaagggcctgcagcctgacgacagcggcatctacttttgcgccagagatcccttcggcgacagagcccctcactacaactaccacatggacgtgtggggcggaggcacagccgtgatagttagcagcgcctctacaaagggccctagcgtgttccctctggctcctagcagcaagtcgacatctggcggaacagccgctctgggctgtctggtcaaggactactttcccgagcctgtgacagtgtcctggaactctggcgctctgacaagcggcgtgcacacatttccagccgtgctgcaaagcagcggcctgtactctctgagcagcgtggtcacagtgccaagctctagcctgggcacccagacctacatctgcaatgtgaaccacaagcctagcaacaccaaggtggacaagaaggtggaacccaagagctgcgacaagacccacacctgtcctccatgtcctgctccagaactgctcggcggaccttccgtgttcctgtttcctccaaagcctaaggacaccctgatgatcagcagaacccctgaagtgacctgcgtggtggtggatgtgtctcacgaggacccagaagtgaagttcaattggtacgtggacggcgtggaagtgcacaacgccaagaccaagcctagagaggaacagtacaacagcacctacagagtggtgtccgtgctgacagtgctgcaccaggattggctgaacggcaaagagtacaagtgcaaggtgtccaacaaggccctgcctgctcctatcgagaaaaccatcagcaaggccaagggccagcctagggaaccccaggtttacacactgcctccaagccgcgacgaactgaccaagaaccaggtgtccctgacctgcctcgtgaagggcttctacccttccgatatcgccgtggaatgggagagcaatggccagcctgagaacaactacaagacaacccctcctgtgctggacagcgacggctcattcttcctgtacagcaagctgactgtggataagtcccggtggcagcagggcaacgtgttcagctgttctgtgatgcacgaagccctgcacaaccactacacccagaaaagcctgtctctgagccccggcaagtgataa

SEQ ID NO: 146 - RNA, 1446 nt, synthetic construct
  source 1..1446: mol_type = other RNA
atggattggatttggagaatcctgttcctcgtgggcgccgctaccggagcccactcccagggcagactgtttcagtctggcgccgaagtgaaaagaccaggcgcctctgtgcggatcagctgcagagctgacgacgacccctacaccgacgacgataccttcaccaagtactggacccactggatcagacaggcccctggacaaagacctgagtggctgggagtgatcagccctcacttcgccagacctatctacagctacaagttccgggacagactgaccctgaccagagacagctctctgaccgccgtgtacctggaactgaagggcctgcagcctgacgacagcggcatctacttttgcgccagagatcccttcggcgacagagcccctcactacaactaccacatggacgtgtggggcggaggcacagccgtgatagttagcagcgcctctacaaagggccctagcgtgttccctctggctcctagcagcaagtcgacatctggcggaacagccgctctgggctgtctggtcaaggactactttcccgagcctgtgacagtgtcctggaactctggcgctctgacaagcggcgtgcacacatttccagccgtgctgcaaagcagcggcctgtactctctgagcagcgtggtcacagtgccaagctctagcctgggcacccagacctacatctgcaatgtgaaccacaagcctagcaacaccaaggtggacaagaaggtggaacccaagagctgcgacaagacccacacctgtcctccatgtcctgctccagaactgctcggcggaccttccgtgttcctgtttcctccaaagcctaaggacaccctgatgatcagcagaacccctgaagtgacctgcgtggtggtggatgtgtctcacgaggacccagaagtgaagttcaattggtacgtggacggcgtggaagtgcacaacgccaagaccaagcctagagaggaacagtacaacagcacctacagagtggtgtccgtgctgacagtgctgcaccaggattggctgaacggcaaagagtacaagtgcaaggtgtccaacaaggccctgcctgctcctatcgagaaaaccatcagcaaggccaagggccagcctagggaaccccaggtttacacactgcctccaagccgcgacgaactgaccaagaaccaggtgtccctgacctgcctcgtgaagggcttctacccttccgatatcgccgtggaatgggagagcaatggccagcctgagaacaactacaagacaacccctcctgtgctggacagcgacggctcattcttcctgtacagcaagctgaccgtggacaagtccagatggcagcagggcaacgtgttcagctgtagcgtgctgcacgaagccctgcacagccactacacccagaaaagcctgtctctgagccccggcaaatgataa

SEQ ID NO: 147 - RNA, 1446 nt, synthetic construct
  source 1..1446: mol_type = other RNA
atggattggatttggagaatcctgttcctcgtgggcgccgctaccggagcccactcccagggcagactgtttcagtctggcgccgaagtgaaaagaccaggcgcctctgtgcggatcagctgcagagctgacgacgacccctacaccgacgacgataccttcaccaagtactggacccactggatcagacaggcccctggacaaagacctgagtggctgggagtgatcagccctcacttcgccagacctatctacagctacaagttccgggacagactgaccctgaccagagacagctctctgaccgccgtgtacctggaactgaagggcctgcagcctgacgacagcggcatctacttttgcgccagagatcccttcggcgacagagcccctcactacaactaccacatggacgtgtggggcggaggcacagccgtgatagttagcagcgcctctacaaagggccctagcgtgttccctctggctcctagcagcaagtcgacatctggcggaacagccgctctgggctgtctggtcaaggactactttcccgagcctgtgacagtgtcctggaactctggcgctctgacaagcggcgtgcacacatttccagccgtgctgcaaagcagcggcctgtactctctgagcagcgtggtcacagtgccaagctctagcctgggcacccagacctacatctgcaatgtgaaccacaagcctagcaacaccaaggtggacaagaaggtggaacccaagagctgcgacaagacccacacctgtcctccatgtcctgctccagaactgctcggcggaccttccgtgttcctgtttcctccaaagcctaaggacaccctgatgatcagcagaacccctgaagtgacctgcgtggtggtggatgtgtctcacgaggacccagaagtgaagttcaattggtacgtggacggcgtggaagtgcacaacgccaagaccaagcctagagaggaacagtacaacagcacctacagagtggtgtccgtgctgacagtgctgcaccaggattggctgaacggcaaagagtacaagtgcaaggtgtccaacaaggccctgcctgctcctatcgagaaaaccatcagcaaggccaagggccagcctcgcgaacctcaagtctgtacactgcctcctagccgcgacgaactgaccaagaaccaggtgtccctgagctgcgccgtgaagggcttttacccttccgatatcgccgtggaatgggagagcaatggccagcctgagaacaactacaagacaacccctcctgtgctggacagcgacggctcattcttcctggtgtccaagctgacagtggacaagagcagatggcagcagggcaacgtgttcagctgcagcgtgctgcatgaagccctgcacagccactacacccagaagtccctgtctctgagccccggcaagtgataa

SEQ ID NO: 148 - RNA, 1446 nt, synthetic construct
  source 1..1446: mol_type = other RNA
atggattggatttggagaatcctgttcctcgtgggcgccgctaccggagcccactcccagggcagactgtttcagtctggcgccgaagtgaaaagaccaggcgcctctgtgcggatcagctgcagagctgacgacgacccctacaccgacgacgataccttcaccaagtactggacccactggatcagacaggcccctggacaaagacctgagtggctgggagtgatcagccctcacttcgccagacctatctacagctacaagttccgggacagactgaccctgaccagagacagctctctgaccgccgtgtacctggaactgaagggcctgcagcctgacgacagcggcatctacttttgcgccagagatcccttcggcgacagagcccctcactacaactaccacatggacgtgtggggcggaggcacagccgtgatagttagcagcgcctctacaaagggccctagcgtgttccctctggctcctagcagcaagtcgacatctggcggaacagccgctctgggctgtctggtcaaggactactttcccgagcctgtgacagtgtcctggaactctggcgctctgacaagcggcgtgcacacatttccagccgtgctgcaaagcagcggcctgtactctctgagcagcgtggtcacagtgccaagctctagcctgggcacccagacctacatctgcaatgtgaaccacaagcctagcaacaccaaggtggacaagaaggtggaacccaagagctgcgacaagacccacacctgtcctccatgtcctgctccagaactgctcggcggaccttccgtgttcctgtttcctccaaagcctaaggacaccctgatgatcagcagaacccctgaagtgacctgcgtggtggtggatgtgtctcacgaggacccagaagtgaagttcaattggtacgtggacggcgtggaagtgcacaacgccaagaccaagcctagagaggaacagtacaacagcacctacagagtggtgtccgtgctgacagtgctgcaccaggattggctgaacggcaaagagtacaagtgcaaggtgtccaacaaggccctgcctgctcctatcgagaaaaccatcagcaaggccaagggccagcctagggaaccccaggtttacaccctgcctccatgccgcgacgaactgaccaagaaccaggtgtccctgtggtgcctggtcaagggcttctacccttccgatatcgccgtggaatgggagagcaatggccagcctgagaacaactacaagacaacccctcctgtgctggacagcgacggctcattcttcctgtacagcaagctgacagtggacaagagcagatggcagcagggcaacgtgttcagctgcagcgtgctgcatgaagccctgcacagccactacacccagaagtccctgtctctgagccccggcaagtgataa

SEQ ID NO: 149 - RNA, 1446 nt, synthetic construct
  source 1..1446: mol_type = other RNA
atggattggatttggagaatcctgttcctcgtgggcgccgctaccggagcccactcccagggcagactgtttcagtctggcgccgaagtgaaaagaccaggcgcctctgtgcggatcagctgcagagctgacgacgacccctacaccgacgacgataccttcaccaagtactggacccactggatcagacaggcccctggacaaagacctgagtggctgggagtgatcagccctcacttcgccagacctatctacagctacaagttccgggacagactgaccctgaccagagacagctctctgaccgccgtgtacctggaactgaagggcctgcagcctgacgacagcggcatctacttttgcgccagagatcccttcggcgacagagcccctcactacaactaccacatggacgtgtggggcggaggcacagccgtgatagttagcagcgcctctacaaagggccctagcgtgttccctctggctcctagcagcaagtcgacatctggcggaacagccgctctgggctgtctggtcaaggactactttcccgagcctgtgacagtgtcctggaactctggcgctctgacaagcggcgtgcacacatttccagccgtgctgcaaagcagcggcctgtactctctgagcagcgtggtcacagtgccaagctctagcctgggcacccagacctacatctgcaatgtgaaccacaagcctagcaacaccaaggtggacaagaaggtggaacccaagagctgcgacaagacccacacctgtcctccatgtcctgctccagaactgctggccggaccttccgtgttcctgtttcctccaaagcctaaggacaccctgatgatcagcagaacccctgaagtgacctgcgtggtggtggatgtgtctcacgaggaccctgaagtgaagttcaattggtacgtggacggcgtggaagtgcacaacgccaagaccaagcctagagaggaacagtacaacagcacctacagagtggtgtccgtgctgaccgtgctgcaccaggattggctgaacggcaaagagtacaagtgcaaggtgtccaacaaggccctgcctctgcctgaggaaaagaccatcagcaaggccaagggccagcctagggaaccccaggtttacacactgcctccaagccgcgacgaactgaccaagaaccaggtgtccctgacctgcctcgtgaagggcttctacccttccgatatcgccgtggaatgggagagcaatggccagcctgagaacaactacaagacaacccctcctgtgctggacagcgacggctcattcttcctgtacagcaagctgaccgtggacaagtccagatggcagcagggcaacgtgttcagctgtagcgtgctgcacgaagccctgcacagccactacacccagaaaagcctgtctctgagccccggcaaatgataa

SEQ ID NO: 150 - RNA, 1446 nt, synthetic construct
  source 1..1446: mol_type = other RNA
atggattggatttggagaatcctgttcctcgtgggcgccgctaccggagcccactcccagggcagactgtttcagtctggcgccgaagtgaaaagaccaggcgcctctgtgcggatcagctgcagagctgacgacgacccctacaccgacgacgataccttcaccaagtactggacccactggatcagacaggcccctggacaaagacctgagtggctgggagtgatcagccctcacttcgccagacctatctacagctacaagttccgggacagactgaccctgaccagagacagctctctgaccgccgtgtacctggaactgaagggcctgcagcctgacgacagcggcatctacttttgcgccagagatcccttcggcgacagagcccctcactacaactaccacatggacgtgtggggcggaggcacagccgtgatagttagcagcgcctctacaaagggccctagcgtgttccctctggctcctagcagcaagtcgacatctggcggaacagccgctctgggctgtctggtcaaggactactttcccgagcctgtgacagtgtcctggaactctggcgctctgacaagcggcgtgcacacatttccagccgtgctgcaaagcagcggcctgtactctctgagcagcgtggtcacagtgccaagctctagcctgggcacccagacctacatctgcaatgtgaaccacaagcctagcaacaccaaggtggacaagaaggtggaacccaagagctgcgacaagacccacacctgtcctccatgtcctgctccagaactgctggccggaccttccgtgttcctgtttcctccaaagcctaaggacaccctgatgatcagcagaacccctgaagtgacctgcgtggtggtggatgtgtctcacgaggaccctgaagtgaagttcaattggtacgtggacggcgtggaagtgcacaacgccaagaccaagcctagagaggaacagtacaacagcacctacagagtggtgtccgtgctgaccgtgctgcaccaggattggctgaacggcaaagagtacaagtgcaaggtgtccaacaaggccctgcctgcccctgaggaaaagaccatcagcaaggccaagggccagcctagggaaccccaggtttacacactgcctccaagccgcgacgaactgaccaagaaccaggtgtccctgacctgcctcgtgaagggcttctacccttccgatatcgccgtggaatgggagagcaatggccagcctgagaacaactacaagacaacccctcctgtgctggacagcgacggctcattcttcctgtacagcaagctgaccgtggacaagtccagatggcagcagggcaacgtgttcagctgtagcgtgctgcacgaagccctgcacagccactacacccagaaaagcctgtctctgagccccggcaaatgataa

SEQ ID NO: 151 - RNA, 1446 nt, synthetic construct
  source 1..1446: mol_type = other RNA
atggattggatttggagaatcctgttcctcgtgggcgccgctaccggagcccactcccagggcagactgtttcagtctggcgccgaagtgaaaagaccaggcgcctctgtgcggatcagctgcagagctgacgacgacccctacaccgacgacgataccttcaccaagtactggacccactggatcagacaggcccctggacaaagacctgagtggctgggagtgatcagccctcacttcgccagacctatctacagctacaagttccgggacagactgaccctgaccagagacagctctctgaccgccgtgtacctggaactgaagggcctgcagcctgacgacagcggcatctacttttgcgccagagatcccttcggcgacagagcccctcactacaactaccacatggacgtgtggggcggaggcacagccgtgatagttagcagcgcctctacaaagggccctagcgtgttccctctggctcctagcagcaagtcgacatctggcggaacagccgctctgggctgtctggtcaaggactactttcccgagcctgtgacagtgtcctggaactctggcgctctgacaagcggcgtgcacacatttccagccgtgctgcaaagcagcggcctgtactctctgagcagcgtggtcacagtgccaagctctagcctgggcacccagacctacatctgcaatgtgaaccacaagcctagcaacaccaaggtggacaagaaggtggaacccaagagctgcgacaagacccacacctgtcctccatgtcctgctccagaactgctggccggaccttccgtgttcctgtttcctccaaagcctaaggacaccctgatgatcagcagaacccctgaagtgacctgcgtggtggtggatgtgtctcacgaggaccctgaagtgaagttcaattggtacgtggacggcgtggaagtgcacaacgccaagaccaagcctagagaggaacagtacaacagcacctacagagtggtgtccgtgctgaccgtgctgcaccaggattggctgaacggcaaagagtacaagtgcaaggtgtccaacaaggccctgcctgcccctatcgaaaagaccatcagcaaggccaagggccagcctagggaaccccaggtttacacactgcctccaagccgcgacgaactgaccaagaaccaggtgtccctgacctgcctcgtgaagggcttctacccttccgatatcgccgtggaatgggagagcaatggccagcctgagaacaactacaagacaacccctcctgtgctggacagcgacggctcattcttcctgtacagcaagctgaccgtggacaagtccagatggcagcagggcaacgtgttcagctgtagcgtgctgcacgaagccctgcacagccactacacccagaaaagcctgtctctgagccccggcaaatgataa

SEQ ID NO: 152 - RNA, 1446 nt, synthetic construct
  source 1..1446: mol_type = other RNA
atggattggatttggagaatcctgttcctcgtgggcgccgctaccggagcccactcccagggcagactgtttcagtctggcgccgaagtgaaaagaccaggcgcctctgtgcggatcagctgcagagctgacgacgacccctacaccgacgacgataccttcaccaagtactggacccactggatcagacaggcccctggacaaagacctgagtggctgggagtgatcagccctcacttcgccagacctatctacagctacaagttccgggacagactgaccctgaccagagacagctctctgaccgccgtgtacctggaactgaagggcctgcagcctgacgacagcggcatctacttttgcgccagagatcccttcggcgacagagcccctcactacaactaccacatggacgtgtggggcggaggcacagccgtgatagttagcagcgcctctacaaagggccctagcgtgttccctctggctcctagcagcaagtcgacatctggcggaacagccgctctgggctgtctggtcaaggactactttcccgagcctgtgacagtgtcctggaactctggcgctctgacaagcggcgtgcacacatttccagccgtgctgcaaagcagcggcctgtactctctgagcagcgtggtcacagtgccaagctctagcctgggcacccagacctacatctgcaatgtgaaccacaagcctagcaacaccaaggtggacaagaaggtggaacccaagagctgcgacaagacccacacctgtcctccatgtcctgctccagaactgctgggcggaccttccgtgttcctgtttcctccaaagcctaaggacaccctgatgatcagcagaacccctgaagtgacctgcgtggtggtggatgtgtctcacgaggaccctgaagtgaagttcaattggtacgtggacggcgtggaagtgcacaacgccaagaccaagcctagagaggaacagtacaacagcacctacagagtggtgtccgtgctgaccgtgctgcaccaggattggctgaacggcaaagagtacaagtgcaaggtgtccaacaaggccctgcctgcccctgaggaaaagaccatcagcaaggccaagggccagcctagggaaccccaggtttacacactgcctccaagccgcgacgaactgaccaagaaccaggtgtccctgacctgcctcgtgaagggcttctacccttccgatatcgccgtggaatgggagagcaatggccagcctgagaacaactacaagacaacccctcctgtgctggacagcgacggctcattcttcctgtacagcaagctgaccgtggacaagtccagatggcagcagggcaacgtgttcagctgtagcgtgctgcacgaagccctgcacagccactacacccagaaaagcctgtctctgagccccggcaaatgataa

SEQ ID NO: 153 - RNA, 1446 nt, synthetic construct
  source 1..1446: mol_type = other RNA
atggattggatttggagaatcctgttcctcgtgggcgccgctaccggagcccactcccagggcagactgtttcagtctggcgccgaagtgaaaagaccaggcgcctctgtgcggatcagctgcagagctgacgacgacccctacaccgacgacgataccttcaccaagtactggacccactggatcagacaggcccctggacaaagacctgagtggctgggagtgatcagccctcacttcgccagacctatctacagctacaagttccgggacagactgaccctgaccagagacagctctctgaccgccgtgtacctggaactgaagggcctgcagcctgacgacagcggcatctacttttgcgccagagatcccttcggcgacagagcccctcactacaactaccacatggacgtgtggggcggaggcacagccgtgatagttagcagcgcctctacaaagggccctagcgtgttccctctggctcctagcagcaagtcgacatctggcggaacagccgctctgggctgtctggtcaaggactactttcccgagcctgtgacagtgtcctggaactctggcgctctgacaagcggcgtgcacacatttccagccgtgctgcaaagcagcggcctgtactctctgagcagcgtggtcacagtgccaagctctagcctgggcacccagacctacatctgcaatgtgaaccacaagcctagcaacaccaaggtggacaagaaggtggaacccaagagctgcgacaagacccacacctgtcctccatgtcctgctccagaactgctggccggaccttccgtgttcctgtttcctccaaagcctaaggacaccctgatgatcagcagaacccctgaagtgacctgcgtggtggtggatgtgtctcacgaggaccctgaagtgaagttcaattggtacgtggacggcgtggaagtgcacaacgccaagaccaagcctagagaggaacagtacaacagcacctacagagtggtgtccgtgctgaccgtgctgcaccaggattggctgaacggcaaagagtacaagtgcaaggtgtccaacaaggccctgcctctgcctgaggaaaagaccatcagcaaggccaagggccagcctcgcgaacctcaagtctgtacactgcctcctagccgcgacgaactgaccaagaaccaggtgtccctgagctgcgccgtgaagggcttttacccttccgatatcgccgtggaatgggagagcaatggccagcctgagaacaactacaagacaacccctcctgtgctggacagcgacggctcattcttcctggtgtccaagctgacagtggacaagagcagatggcagcagggcaacgtgttcagctgcagcgtgctgcatgaagccctgcacagccactacacccagaagtccctgtctctgagccccggcaagtgataa

SEQ ID NO: 154 - RNA, 1446 nt, synthetic construct
  source 1..1446: mol_type = other RNA
atggattggatttggagaatcctgttcctcgtgggcgccgctaccggagcccactcccagggcagactgtttcagtctggcgccgaagtgaaaagaccaggcgcctctgtgcggatcagctgcagagctgacgacgacccctacaccgacgacgataccttcaccaagtactggacccactggatcagacaggcccctggacaaagacctgagtggctgggagtgatcagccctcacttcgccagacctatctacagctacaagttccgggacagactgaccctgaccagagacagctctctgaccgccgtgtacctggaactgaagggcctgcagcctgacgacagcggcatctacttttgcgccagagatcccttcggcgacagagcccctcactacaactaccacatggacgtgtggggcggaggcacagccgtgatagttagcagcgcctctacaaagggccctagcgtgttccctctggctcctagcagcaagtcgacatctggcggaacagccgctctgggctgtctggtcaaggactactttcccgagcctgtgacagtgtcctggaactctggcgctctgacaagcggcgtgcacacatttccagccgtgctgcaaagcagcggcctgtactctctgagcagcgtggtcacagtgccaagctctagcctgggcacccagacctacatctgcaatgtgaaccacaagcctagcaacaccaaggtggacaagaaggtggaacccaagagctgcgacaagacccacacctgtcctccatgtcctgctccagaactgctggccggaccttccgtgttcctgtttcctccaaagcctaaggacaccctgatgatcagcagaacccctgaagtgacctgcgtggtggtggatgtgtctcacgaggaccctgaagtgaagttcaattggtacgtggacggcgtggaagtgcacaacgccaagaccaagcctagagaggaacagtacaacagcacctacagagtggtgtccgtgctgaccgtgctgcaccaggattggctgaacggcaaagagtacaagtgcaaggtgtccaacaaggccctgcctgcccctgaggaaaagaccatcagcaaggccaagggccagcctcgcgaacctcaagtctgtacactgcctcctagccgcgacgaactgaccaagaaccaggtgtccctgagctgcgccgtgaagggcttttacccttccgatatcgccgtggaatgggagagcaatggccagcctgagaacaactacaagacaacccctcctgtgctggacagcgacggctcattcttcctggtgtccaagctgacagtggacaagagcagatggcagcagggcaacgtgttcagctgcagcgtgctgcatgaagccctgcacagccactacacccagaagtccctgtctctgagccccggcaagtgataa

SEQ ID NO: 155 - RNA, 1446 nt, synthetic construct
  source 1..1446: mol_type = other RNA
atggattggatttggagaatcctgttcctcgtgggcgccgctaccggagcccactcccagggcagactgtttcagtctggcgccgaagtgaaaagaccaggcgcctctgtgcggatcagctgcagagctgacgacgacccctacaccgacgacgataccttcaccaagtactggacccactggatcagacaggcccctggacaaagacctgagtggctgggagtgatcagccctcacttcgccagacctatctacagctacaagttccgggacagactgaccctgaccagagacagctctctgaccgccgtgtacctggaactgaagggcctgcagcctgacgacagcggcatctacttttgcgccagagatcccttcggcgacagagcccctcactacaactaccacatggacgtgtggggcggaggcacagccgtgatagttagcagcgcctctacaaagggccctagcgtgttccctctggctcctagcagcaagtcgacatctggcggaacagccgctctgggctgtctggtcaaggactactttcccgagcctgtgacagtgtcctggaactctggcgctctgacaagcggcgtgcacacatttccagccgtgctgcaaagcagcggcctgtactctctgagcagcgtggtcacagtgccaagctctagcctgggcacccagacctacatctgcaatgtgaaccacaagcctagcaacaccaaggtggacaagaaggtggaacccaagagctgcgacaagacccacacctgtcctccatgtcctgctccagaactgctggccggaccttccgtgttcctgtttcctccaaagcctaaggacaccctgatgatcagcagaacccctgaagtgacctgcgtggtggtggatgtgtctcacgaggaccctgaagtgaagttcaattggtacgtggacggcgtggaagtgcacaacgccaagaccaagcctagagaggaacagtacaacagcacctacagagtggtgtccgtgctgaccgtgctgcaccaggattggctgaacggcaaagagtacaagtgcaaggtgtccaacaaggccctgcctgcccctatcgaaaagaccatcagcaaggccaagggccagcctcgcgaacctcaagtctgtacactgcctcctagccgcgacgaactgaccaagaaccaggtgtccctgagctgcgccgtgaagggcttttacccttccgatatcgccgtggaatgggagagcaatggccagcctgagaacaactacaagacaacccctcctgtgctggacagcgacggctcattcttcctggtgtccaagctgacagtggacaagagcagatggcagcagggcaacgtgttcagctgcagcgtgctgcatgaagccctgcacagccactacacccagaagtccctgtctctgagccccggcaagtgataa

SEQ ID NO: 156 - RNA, 1446 nt, synthetic construct
  source 1..1446: mol_type = other RNA
atggattggatttggagaatcctgttcctcgtgggcgccgctaccggagcccactcccagggcagactgtttcagtctggcgccgaagtgaaaagaccaggcgcctctgtgcggatcagctgcagagctgacgacgacccctacaccgacgacgataccttcaccaagtactggacccactggatcagacaggcccctggacaaagacctgagtggctgggagtgatcagccctcacttcgccagacctatctacagctacaagttccgggacagactgaccctgaccagagacagctctctgaccgccgtgtacctggaactgaagggcctgcagcctgacgacagcggcatctacttttgcgccagagatcccttcggcgacagagcccctcactacaactaccacatggacgtgtggggcggaggcacagccgtgatagttagcagcgcctctacaaagggccctagcgtgttccctctggctcctagcagcaagtcgacatctggcggaacagccgctctgggctgtctggtcaaggactactttcccgagcctgtgacagtgtcctggaactctggcgctctgacaagcggcgtgcacacatttccagccgtgctgcaaagcagcggcctgtactctctgagcagcgtggtcacagtgccaagctctagcctgggcacccagacctacatctgcaatgtgaaccacaagcctagcaacaccaaggtggacaagaaggtggaacccaagagctgcgacaagacccacacctgtcctccatgtcctgctccagaactgctgggcggaccttccgtgttcctgtttcctccaaagcctaaggacaccctgatgatcagcagaacccctgaagtgacctgcgtggtggtggatgtgtctcacgaggaccctgaagtgaagttcaattggtacgtggacggcgtggaagtgcacaacgccaagaccaagcctagagaggaacagtacaacagcacctacagagtggtgtccgtgctgaccgtgctgcaccaggattggctgaacggcaaagagtacaagtgcaaggtgtccaacaaggccctgcctgcccctgaggaaaagaccatcagcaaggccaagggccagcctcgcgaacctcaagtctgtacactgcctcctagccgcgacgaactgaccaagaaccaggtgtccctgagctgcgccgtgaagggcttttacccttccgatatcgccgtggaatgggagagcaatggccagcctgagaacaactacaagacaacccctcctgtgctggacagcgacggctcattcttcctggtgtccaagctgacagtggacaagagcagatggcagcagggcaacgtgttcagctgcagcgtgctgcatgaagccctgcacagccactacacccagaagtccctgtctctgagccccggcaagtgataa

SEQ ID NO: 157 - RNA, 1446 nt, synthetic construct
  source 1..1446: mol_type = other RNA
atggattggatttggagaatcctgttcctcgtgggcgccgctaccggagcccactcccagggcagactgtttcagtctggcgccgaagtgaaaagaccaggcgcctctgtgcggatcagctgcagagctgacgacgacccctacaccgacgacgataccttcaccaagtactggacccactggatcagacaggcccctggacaaagacctgagtggctgggagtgatcagccctcacttcgccagacctatctacagctacaagttccgggacagactgaccctgaccagagacagctctctgaccgccgtgtacctggaactgaagggcctgcagcctgacgacagcggcatctacttttgcgccagagatcccttcggcgacagagcccctcactacaactaccacatggacgtgtggggcggaggcacagccgtgatagttagcagcgcctctacaaagggccctagcgtgttccctctggctcctagcagcaagtcgacatctggcggaacagccgctctgggctgtctggtcaaggactactttcccgagcctgtgacagtgtcctggaactctggcgctctgacaagcggcgtgcacacatttccagccgtgctgcaaagcagcggcctgtactctctgagcagcgtggtcacagtgccaagctctagcctgggcacccagacctacatctgcaatgtgaaccacaagcctagcaacaccaaggtggacaagaaggtggaacccaagagctgcgacaagacccacacctgtcctccatgtcctgctccagaactgctggccggaccttccgtgttcctgtttcctccaaagcctaaggacaccctgatgatcagcagaacccctgaagtgacctgcgtggtggtggatgtgtctcacgaggaccctgaagtgaagttcaattggtacgtggacggcgtggaagtgcacaacgccaagaccaagcctagagaggaacagtacaacagcacctacagagtggtgtccgtgctgaccgtgctgcaccaggattggctgaacggcaaagagtacaagtgcaaggtgtccaacaaggccctgcctctgcctgaggaaaagaccatcagcaaggccaagggccagcctagggaaccccaggtttacaccctgcctccatgccgcgacgaactgaccaagaaccaggtgtccctgtggtgcctggtcaagggcttctacccttccgatatcgccgtggaatgggagagcaatggccagcctgagaacaactacaagacaacccctcctgtgctggacagcgacggctcattcttcctgtacagcaagctgacagtggacaagagcagatggcagcagggcaacgtgttcagctgcagcgtgctgcatgaagccctgcacagccactacacccagaagtccctgtctctgagccccggcaagtgataa

SEQ ID NO: 158 - RNA, 1446 nt, synthetic construct
  source 1..1446: mol_type = other RNA
atggattggatttggagaatcctgttcctcgtgggcgccgctaccggagcccactcccagggcagactgtttcagtctggcgccgaagtgaaaagaccaggcgcctctgtgcggatcagctgcagagctgacgacgacccctacaccgacgacgataccttcaccaagtactggacccactggatcagacaggcccctggacaaagacctgagtggctgggagtgatcagccctcacttcgccagacctatctacagctacaagttccgggacagactgaccctgaccagagacagctctctgaccgccgtgtacctggaactgaagggcctgcagcctgacgacagcggcatctacttttgcgccagagatcccttcggcgacagagcccctcactacaactaccacatggacgtgtggggcggaggcacagccgtgatagttagcagcgcctctacaaagggccctagcgtgttccctctggctcctagcagcaagtcgacatctggcggaacagccgctctgggctgtctggtcaaggactactttcccgagcctgtgacagtgtcctggaactctggcgctctgacaagcggcgtgcacacatttccagccgtgctgcaaagcagcggcctgtactctctgagcagcgtggtcacagtgccaagctctagcctgggcacccagacctacatctgcaatgtgaaccacaagcctagcaacaccaaggtggacaagaaggtggaacccaagagctgcgacaagacccacacctgtcctccatgtcctgctccagaactgctggccggaccttccgtgttcctgtttcctccaaagcctaaggacaccctgatgatcagcagaacccctgaagtgacctgcgtggtggtggatgtgtctcacgaggaccctgaagtgaagttcaattggtacgtggacggcgtggaagtgcacaacgccaagaccaagcctagagaggaacagtacaacagcacctacagagtggtgtccgtgctgaccgtgctgcaccaggattggctgaacggcaaagagtacaagtgcaaggtgtccaacaaggccctgcctgcccctgaggaaaagaccatcagcaaggccaagggccagcctagggaaccccaggtttacaccctgcctccatgccgcgacgaactgaccaagaaccaggtgtccctgtggtgcctggtcaagggcttctacccttccgatatcgccgtggaatgggagagcaatggccagcctgagaacaactacaagacaacccctcctgtgctggacagcgacggctcattcttcctgtacagcaagctgacagtggacaagagcagatggcagcagggcaacgtgttcagctgcagcgtgctgcatgaagccctgcacagccactacacccagaagtccctgtctctgagccccggcaagtgataa

SEQ ID NO: 159 - RNA, 1446 nt, synthetic construct
  source 1..1446: mol_type = other RNA
atggattggatttggagaatcctgttcctcgtgggcgccgctaccggagcccactcccagggcagactgtttcagtctggcgccgaagtgaaaagaccaggcgcctctgtgcggatcagctgcagagctgacgacgacccctacaccgacgacgataccttcaccaagtactggacccactggatcagacaggcccctggacaaagacctgagtggctgggagtgatcagccctcacttcgccagacctatctacagctacaagttccgggacagactgaccctgaccagagacagctctctgaccgccgtgtacctggaactgaagggcctgcagcctgacgacagcggcatctacttttgcgccagagatcccttcggcgacagagcccctcactacaactaccacatggacgtgtggggcggaggcacagccgtgatagttagcagcgcctctacaaagggccctagcgtgttccctctggctcctagcagcaagtcgacatctggcggaacagccgctctgggctgtctggtcaaggactactttcccgagcctgtgacagtgtcctggaactctggcgctctgacaagcggcgtgcacacatttccagccgtgctgcaaagcagcggcctgtactctctgagcagcgtggtcacagtgccaagctctagcctgggcacccagacctacatctgcaatgtgaaccacaagcctagcaacaccaaggtggacaagaaggtggaacccaagagctgcgacaagacccacacctgtcctccatgtcctgctccagaactgctggccggaccttccgtgttcctgtttcctccaaagcctaaggacaccctgatgatcagcagaacccctgaagtgacctgcgtggtggtggatgtgtctcacgaggaccctgaagtgaagttcaattggtacgtggacggcgtggaagtgcacaacgccaagaccaagcctagagaggaacagtacaacagcacctacagagtggtgtccgtgctgaccgtgctgcaccaggattggctgaacggcaaagagtacaagtgcaaggtgtccaacaaggccctgcctgcccctatcgaaaagaccatcagcaaggccaagggccagcctagggaaccccaggtttacaccctgcctccatgccgcgacgaactgaccaagaaccaggtgtccctgtggtgcctggtcaagggcttctacccttccgatatcgccgtggaatgggagagcaatggccagcctgagaacaactacaagacaacccctcctgtgctggacagcgacggctcattcttcctgtacagcaagctgacagtggacaagagcagatggcagcagggcaacgtgttcagctgcagcgtgctgcatgaagccctgcacagccactacacccagaagtccctgtctctgagccccggcaagtgataa

SEQ ID NO: 160 - RNA, 1446 nt, synthetic construct
  source 1..1446: mol_type = other RNA
atggattggatttggagaatcctgttcctcgtgggcgccgctaccggagcccactcccagggcagactgtttcagtctggcgccgaagtgaaaagaccaggcgcctctgtgcggatcagctgcagagctgacgacgacccctacaccgacgacgataccttcaccaagtactggacccactggatcagacaggcccctggacaaagacctgagtggctgggagtgatcagccctcacttcgccagacctatctacagctacaagttccgggacagactgaccctgaccagagacagctctctgaccgccgtgtacctggaactgaagggcctgcagcctgacgacagcggcatctacttttgcgccagagatcccttcggcgacagagcccctcactacaactaccacatggacgtgtggggcggaggcacagccgtgatagttagcagcgcctctacaaagggccctagcgtgttccctctggctcctagcagcaagtcgacatctggcggaacagccgctctgggctgtctggtcaaggactactttcccgagcctgtgacagtgtcctggaactctggcgctctgacaagcggcgtgcacacatttccagccgtgctgcaaagcagcggcctgtactctctgagcagcgtggtcacagtgccaagctctagcctgggcacccagacctacatctgcaatgtgaaccacaagcctagcaacaccaaggtggacaagaaggtggaacccaagagctgcgacaagacccacacctgtcctccatgtcctgctccagaactgctgggcggaccttccgtgttcctgtttcctccaaagcctaaggacaccctgatgatcagcagaacccctgaagtgacctgcgtggtggtggatgtgtctcacgaggaccctgaagtgaagttcaattggtacgtggacggcgtggaagtgcacaacgccaagaccaagcctagagaggaacagtacaacagcacctacagagtggtgtccgtgctgaccgtgctgcaccaggattggctgaacggcaaagagtacaagtgcaaggtgtccaacaaggccctgcctgcccctgaggaaaagaccatcagcaaggccaagggccagcctagggaaccccaggtttacaccctgcctccatgccgcgacgaactgaccaagaaccaggtgtccctgtggtgcctggtcaagggcttctacccttccgatatcgccgtggaatgggagagcaatggccagcctgagaacaactacaagacaacccctcctgtgctggacagcgacggctcattcttcctgtacagcaagctgacagtggacaagagcagatggcagcagggcaacgtgttcagctgcagcgtgctgcatgaagccctgcacagccactacacccagaagtccctgtctctgagccccggcaagtgataa

SEQ ID NO: 161 - RNA, 1458 nt, synthetic construct
  source 1..1458: mol_type = other RNA
atggattggatttggagaatcctgttcctcgtgggcgccgctaccggagcccactcccagggcagactgtttcagtctggcgccgaagtgaaaagaccaggcgcctctgtgcggatcagctgcagagctgacgacgacccctacaccgacgacgataccttcaccaagtactggacccactggatcagacaggcccctggacaaagacctgagtggctgggagtgatcagccctcacttcgccagacctatctacagctacaagttccgggacagactgaccctgaccagagacagctctctgaccgccgtgtacctggaactgaagggcctgcagcctgacgacagcggcatctacttttgcgccagagatcccttcggcgacagagcccctcactacaactaccacatggacgtgtggggcggaggcacagccgtgatagttagcagcgcatctgtggccgctcctagcgtgttcatcttcccacctagcgacgaggaactgaagtctggcacagccagcgtcgtgtgcctgctgaacaacttctaccccagagaagccaaggtgcagtggaaggtggacaacgccctgcagagcggcaatagccaagagagcgtgaccgagcaggacagcaaggactctacctacagcctgagcagcaccctgacactgagcaaggccgactacgagaagcacaaagtgtacgcctgcgaagtgacccaccagggcctttctagccctgtgaccaagagcttcaaccggggcgagtgcgataagacccacacctgtcctccatgtccagctccagaactgctcggcggaccttccgtgttcctgtttcctccaaagcctaaggacaccctgatgatcagcagaacccctgaagtgacctgcgtggtggtggatgtgtctcacgaggacccagaagtgaagttcaattggtacgtggacggcgtggaagtgcacaacgccaagaccaagcctagagaggaacagtacaacagcacctacagagtggtgtccgtgctgacagtgctgcaccaggattggctgaacggcaaagagtacaagtgcaaggtgtccaacaaggccctgcctgctcctatcgagaaaaccatcagcaaggccaagggccagcctagggaaccccaggtttacacactgcctccaagccgcgaggaaatgaccaagaaccaggtgtccctgacctgcctcgtgaagggcttctacccttccgatatcgccgtggaatgggagagcaatggccagcctgagaacaactacaagacaacccctcctgtgctggacagcgacggctcattcttcctgtacagcaagctgactgtggataagtcccggtggcagcagggcaacgtgttcagctgttctgtgatgcacgaagccctgcacaaccactacacccagaaaagcctgtctctgagccccggcaagtgataa

SEQ ID NO: 162 - RNA, 1458 nt, synthetic construct
  source 1..1458: mol_type = other RNA
atggattggatttggagaatcctgttcctcgtgggcgccgctaccggagcccactcccagggcagactgtttcagtctggcgccgaagtgaaaagaccaggcgcctctgtgcggatcagctgcagagctgacgacgacccctacaccgacgacgataccttcaccaagtactggacccactggatcagacaggcccctggacaaagacctgagtggctgggagtgatcagccctcacttcgccagacctatctacagctacaagttccgggacagactgaccctgaccagagacagctctctgaccgccgtgtacctggaactgaagggcctgcagcctgacgacagcggcatctacttttgcgccagagatcccttcggcgacagagcccctcactacaactaccacatggacgtgtggggcggaggcacagccgtgatagttagcagcgcatctgtggccgctcctagcgtgttcatcttcccacctagcgacgaggaactgaagtctggcacagccagcgtcgtgtgcctgctgaacaacttctaccccagagaagccaaggtgcagtggaaggtggacaacgccctgcagagcggcaatagccaagagagcgtgaccgagcaggacagcaaggactctacctacagcctgagcagcaccctgacactgagcaaggccgactacgagaagcacaaagtgtacgcctgcgaagtgacccaccagggcctttctagccctgtgaccaagagcttcaaccggggcgagtgcgataagacccacacctgtcctccatgtccagctccagaactgctcggcggaccttccgtgttcctgtttcctccaaagcctaaggacaccctgatgatcagcagaacccctgaagtgacctgcgtggtggtggatgtgtctcacgaggacccagaagtgaagttcaattggtacgtggacggcgtggaagtgcacaacgccaagaccaagcctagagaggaacagtacaacagcacctacagagtggtgtccgtgctgacagtgctgcaccaggattggctgaacggcaaagagtacaagtgcaaggtgtccaacaaggccctgcctgctcctatcgagaaaaccatcagcaaggccaagggccagcctagggaaccccaggtttacacactgcctccaagccgcgaggaaatgaccaagaaccaggtgtccctgacctgcctcgtgaagggcttctacccttccgatatcgccgtggaatgggagagcaatggccagcctgagaacaactacaagacaacccctcctgtgctggacagcgacggctcattcttcctgtacagcaagctgaccgtggacaagtccagatggcagcagggcaacgtgttcagctgtagcgtgctgcacgaagccctgcacagccactacacccagaaaagcctgtctctgagccccggcaaatgataa

SEQ ID NO: 163 - RNA, 1458 nt, synthetic construct
  source 1..1458: mol_type = other RNA
atggattggatttggagaatcctgttcctcgtgggcgccgctaccggagcccactcccagggcagactgtttcagtctggcgccgaagtgaaaagaccaggcgcctctgtgcggatcagctgcagagctgacgacgacccctacaccgacgacgataccttcaccaagtactggacccactggatcagacaggcccctggacaaagacctgagtggctgggagtgatcagccctcacttcgccagacctatctacagctacaagttccgggacagactgaccctgaccagagacagctctctgaccgccgtgtacctggaactgaagggcctgcagcctgacgacagcggcatctacttttgcgccagagatcccttcggcgacagagcccctcactacaactaccacatggacgtgtggggcggaggcacagccgtgatagttagcagcgcatctgtggccgctcctagcgtgttcatcttcccacctagcgacgaggaactgaagtctggcacagccagcgtcgtgtgcctgctgaacaacttctaccccagagaagccaaggtgcagtggaaggtggacaacgccctgcagagcggcaatagccaagagagcgtgaccgagcaggacagcaaggactctacctacagcctgagcagcaccctgacactgagcaaggccgactacgagaagcacaaagtgtacgcctgcgaagtgacccaccagggcctttctagccctgtgaccaagagcttcaaccggggcgagtgcgataagacccacacctgtcctccatgtccagctccagaactgctggccggaccttccgtgttcctgtttcctccaaagcctaaggacaccctgatgatcagcagaacccctgaagtgacctgcgtggtggtggatgtgtctcacgaggaccctgaagtgaagttcaattggtacgtggacggcgtggaagtgcacaacgccaagaccaagcctagagaggaacagtacaacagcacctacagagtggtgtccgtgctgaccgtgctgcaccaggattggctgaacggcaaagagtacaagtgcaaggtgtccaacaaggccctgcctctgcctgaggaaaagaccatcagcaaggccaagggccagcctagggaaccccaggtttacacactgcctccaagccgcgaggaaatgaccaagaaccaggtgtccctgacctgcctcgtgaagggcttctacccttccgatatcgccgtggaatgggagagcaatggccagcctgagaacaactacaagacaacccctcctgtgctggacagcgacggctcattcttcctgtacagcaagctgaccgtggacaagtccagatggcagcagggcaacgtgttcagctgtagcgtgctgcacgaagccctgcacagccactacacccagaaaagcctgtctctgagccccggcaaatgataa

SEQ ID NO: 164 - RNA, 1458 nt, synthetic construct
  source 1..1458: mol_type = other RNA
atggattggatttggagaatcctgttcctcgtgggcgccgctaccggagcccactcccagggcagactgtttcagtctggcgccgaagtgaaaagaccaggcgcctctgtgcggatcagctgcagagctgacgacgacccctacaccgacgacgataccttcaccaagtactggacccactggatcagacaggcccctggacaaagacctgagtggctgggagtgatcagccctcacttcgccagacctatctacagctacaagttccgggacagactgaccctgaccagagacagctctctgaccgccgtgtacctggaactgaagggcctgcagcctgacgacagcggcatctacttttgcgccagagatcccttcggcgacagagcccctcactacaactaccacatggacgtgtggggcggaggcacagccgtgatagttagcagcgcatctgtggccgctcctagcgtgttcatcttcccacctagcgacgaggaactgaagtctggcacagccagcgtcgtgtgcctgctgaacaacttctaccccagagaagccaaggtgcagtggaaggtggacaacgccctgcagagcggcaatagccaagagagcgtgaccgagcaggacagcaaggactctacctacagcctgagcagcaccctgacactgagcaaggccgactacgagaagcacaaagtgtacgcctgcgaagtgacccaccagggcctttctagccctgtgaccaagagcttcaaccggggcgagtgcgataagacccacacctgtcctccatgtccagctccagaactgctggccggaccttccgtgttcctgtttcctccaaagcctaaggacaccctgatgatcagcagaacccctgaagtgacctgcgtggtggtggatgtgtctcacgaggaccctgaagtgaagttcaattggtacgtggacggcgtggaagtgcacaacgccaagaccaagcctagagaggaacagtacaacagcacctacagagtggtgtccgtgctgaccgtgctgcaccaggattggctgaacggcaaagagtacaagtgcaaggtgtccaacaaggccctgcctgcccctgaggaaaagaccatcagcaaggccaagggccagcctagggaaccccaggtttacacactgcctccaagccgcgaggaaatgaccaagaaccaggtgtccctgacctgcctcgtgaagggcttctacccttccgatatcgccgtggaatgggagagcaatggccagcctgagaacaactacaagacaacccctcctgtgctggacagcgacggctcattcttcctgtacagcaagctgaccgtggacaagtccagatggcagcagggcaacgtgttcagctgtagcgtgctgcacgaagccctgcacagccactacacccagaaaagcctgtctctgagccccggcaaatgataa

SEQ ID NO: 165 - RNA, 1458 nt, synthetic construct
  source 1..1458: mol_type = other RNA
atggattggatttggagaatcctgttcctcgtgggcgccgctaccggagcccactcccagggcagactgtttcagtctggcgccgaagtgaaaagaccaggcgcctctgtgcggatcagctgcagagctgacgacgacccctacaccgacgacgataccttcaccaagtactggacccactggatcagacaggcccctggacaaagacctgagtggctgggagtgatcagccctcacttcgccagacctatctacagctacaagttccgggacagactgaccctgaccagagacagctctctgaccgccgtgtacctggaactgaagggcctgcagcctgacgacagcggcatctacttttgcgccagagatcccttcggcgacagagcccctcactacaactaccacatggacgtgtggggcggaggcacagccgtgatagttagcagcgcatctgtggccgctcctagcgtgttcatcttcccacctagcgacgaggaactgaagtctggcacagccagcgtcgtgtgcctgctgaacaacttctaccccagagaagccaaggtgcagtggaaggtggacaacgccctgcagagcggcaatagccaagagagcgtgaccgagcaggacagcaaggactctacctacagcctgagcagcaccctgacactgagcaaggccgactacgagaagcacaaagtgtacgcctgcgaagtgacccaccagggcctttctagccctgtgaccaagagcttcaaccggggcgagtgcgataagacccacacctgtcctccatgtccagctccagaactgctggccggaccttccgtgttcctgtttcctccaaagcctaaggacaccctgatgatcagcagaacccctgaagtgacctgcgtggtggtggatgtgtctcacgaggaccctgaagtgaagttcaattggtacgtggacggcgtggaagtgcacaacgccaagaccaagcctagagaggaacagtacaacagcacctacagagtggtgtccgtgctgaccgtgctgcaccaggattggctgaacggcaaagagtacaagtgcaaggtgtccaacaaggccctgcctgcccctatcgaaaagaccatcagcaaggccaagggccagcctagggaaccccaggtttacacactgcctccaagccgcgaggaaatgaccaagaaccaggtgtccctgacctgcctcgtgaagggcttctacccttccgatatcgccgtggaatgggagagcaatggccagcctgagaacaactacaagacaacccctcctgtgctggacagcgacggctcattcttcctgtacagcaagctgaccgtggacaagtccagatggcagcagggcaacgtgttcagctgtagcgtgctgcacgaagccctgcacagccactacacccagaaaagcctgtctctgagccccggcaaatgataa

SEQ ID NO: 166 - RNA, 1458 nt, synthetic construct
  source 1..1458: mol_type = other RNA
atggattggatttggagaatcctgttcctcgtgggcgccgctaccggagcccactcccagggcagactgtttcagtctggcgccgaagtgaaaagaccaggcgcctctgtgcggatcagctgcagagctgacgacgacccctacaccgacgacgataccttcaccaagtactggacccactggatcagacaggcccctggacaaagacctgagtggctgggagtgatcagccctcacttcgccagacctatctacagctacaagttccgggacagactgaccctgaccagagacagctctctgaccgccgtgtacctggaactgaagggcctgcagcctgacgacagcggcatctacttttgcgccagagatcccttcggcgacagagcccctcactacaactaccacatggacgtgtggggcggaggcacagccgtgatagttagcagcgcatctgtggccgctcctagcgtgttcatcttcccacctagcgacgaggaactgaagtctggcacagccagcgtcgtgtgcctgctgaacaacttctaccccagagaagccaaggtgcagtggaaggtggacaacgccctgcagagcggcaatagccaagagagcgtgaccgagcaggacagcaaggactctacctacagcctgagcagcaccctgacactgagcaaggccgactacgagaagcacaaagtgtacgcctgcgaagtgacccaccagggcctttctagccctgtgaccaagagcttcaaccggggcgagtgcgataagacccacacctgtcctccatgtccagctccagaactgctgggcggaccttccgtgttcctgtttcctccaaagcctaaggacaccctgatgatcagcagaacccctgaagtgacctgcgtggtggtggatgtgtctcacgaggaccctgaagtgaagttcaattggtacgtggacggcgtggaagtgcacaacgccaagaccaagcctagagaggaacagtacaacagcacctacagagtggtgtccgtgctgaccgtgctgcaccaggattggctgaacggcaaagagtacaagtgcaaggtgtccaacaaggccctgcctgcccctgaggaaaagaccatcagcaaggccaagggccagcctagggaaccccaggtttacacactgcctccaagccgcgaggaaatgaccaagaaccaggtgtccctgacctgcctcgtgaagggcttctacccttccgatatcgccgtggaatgggagagcaatggccagcctgagaacaactacaagacaacccctcctgtgctggacagcgacggctcattcttcctgtacagcaagctgaccgtggacaagtccagatggcagcagggcaacgtgttcagctgtagcgtgctgcacgaagccctgcacagccactacacccagaaaagcctgtctctgagccccggcaaatgataa

SEQ ID NO: 167 - RNA, 1458 nt, synthetic construct
  source 1..1458: mol_type = other RNA
atggattggatttggagaatcctgttcctcgtgggcgccgctaccggagcccactcccagggcagactgtttcagtctggcgccgaagtgaaaagaccaggcgcctctgtgcggatcagctgcagagctgacgacgacccctacaccgacgacgataccttcaccaagtactggacccactggatcagacaggcccctggacaaagacctgagtggctgggagtgatcagccctcacttcgccagacctatctacagctacaagttccgggacagactgaccctgaccagagacagctctctgaccgccgtgtacctggaactgaagggcctgcagcctgacgacagcggcatctacttttgcgccagagatcccttcggcgacagagcccctcactacaactaccacatggacgtgtggggcggaggcacagccgtgatagttagcagcgcatctgtggccgctcctagcgtgttcatcttcccacctagcgacgaggaactgaagtctggcacagccagcgtcgtgtgcctgctgaacaacttctaccccagagaagccaaggtgcagtggaaggtggacaacgccctgcagagcggcaatagccaagagagcgtgaccgagcaggacagcaaggactctacctacagcctgagcagcaccctgacactgagcaaggccgactacgagaagcacaaagtgtacgcctgcgaagtgacccaccagggcctttctagccctgtgaccaagagcttcaaccggggcgagtgcgataagacccacacctgtcctccatgtccagctccagaactgctcggcggaccttccgtgttcctgtttcctccaaagcctaaggacaccctgatgatcagcagaacccctgaagtgacctgcgtggtggtggatgtgtctcacgaggacccagaagtgaagttcaattggtacgtggacggcgtggaagtgcacaacgccaagaccaagcctagagaggaacagtacaacagcacctacagagtggtgtccgtgctgacagtgctgcaccaggattggctgaacggcaaagagtacaagtgcaaggtgtccaacaaggccctgcctgctcctatcgagaaaaccatcagcaaggccaagggccagcctcgcgaacctcaagtctgtacactgcctcctagccgcgaggaaatgaccaagaaccaggtgtccctgagctgcgccgtgaagggcttttacccttccgatatcgccgtggaatgggagagcaatggccagcctgagaacaactacaagacaacccctcctgtgctggacagcgacggctcattcttcctggtgtccaagctgacagtggacaagagcagatggcagcagggcaacgtgttcagctgcagcgtgctgcatgaagccctgcacagccactacacccagaagtccctgtctctgagccccggcaagtgataa

SEQ ID NO: 168 - RNA, 1458 nt, synthetic construct
  source 1..1458: mol_type = other RNA
atggattggatttggagaatcctgttcctcgtgggcgccgctaccggagcccactcccagggcagactgtttcagtctggcgccgaagtgaaaagaccaggcgcctctgtgcggatcagctgcagagctgacgacgacccctacaccgacgacgataccttcaccaagtactggacccactggatcagacaggcccctggacaaagacctgagtggctgggagtgatcagccctcacttcgccagacctatctacagctacaagttccgggacagactgaccctgaccagagacagctctctgaccgccgtgtacctggaactgaagggcctgcagcctgacgacagcggcatctacttttgcgccagagatcccttcggcgacagagcccctcactacaactaccacatggacgtgtggggcggaggcacagccgtgatagttagcagcgcatctgtggccgctcctagcgtgttcatcttcccacctagcgacgaggaactgaagtctggcacagccagcgtcgtgtgcctgctgaacaacttctaccccagagaagccaaggtgcagtggaaggtggacaacgccctgcagagcggcaatagccaagagagcgtgaccgagcaggacagcaaggactctacctacagcctgagcagcaccctgacactgagcaaggccgactacgagaagcacaaagtgtacgcctgcgaagtgacccaccagggcctttctagccctgtgaccaagagcttcaaccggggcgagtgcgataagacccacacctgtcctccatgtccagctccagaactgctggccggaccttccgtgttcctgtttcctccaaagcctaaggacaccctgatgatcagcagaacccctgaagtgacctgcgtggtggtggatgtgtctcacgaggaccctgaagtgaagttcaattggtacgtggacggcgtggaagtgcacaacgccaagaccaagcctagagaggaacagtacaacagcacctacagagtggtgtccgtgctgaccgtgctgcaccaggattggctgaacggcaaagagtacaagtgcaaggtgtccaacaaggccctgcctctgcctgaggaaaagaccatcagcaaggccaagggccagcctcgcgaacctcaagtctgtacactgcctcctagccgcgaggaaatgaccaagaaccaggtgtccctgagctgcgccgtgaagggcttttacccttccgatatcgccgtggaatgggagagcaatggccagcctgagaacaactacaagacaacccctcctgtgctggacagcgacggctcattcttcctggtgtccaagctgacagtggacaagagcagatggcagcagggcaacgtgttcagctgcagcgtgctgcatgaagccctgcacagccactacacccagaagtccctgtctctgagccccggcaagtgataa

SEQ ID NO: 169 - RNA, 1458 nt, synthetic construct
  source 1..1458: mol_type = other RNA
atggattggatttggagaatcctgttcctcgtgggcgccgctaccggagcccactcccagggcagactgtttcagtctggcgccgaagtgaaaagaccaggcgcctctgtgcggatcagctgcagagctgacgacgacccctacaccgacgacgataccttcaccaagtactggacccactggatcagacaggcccctggacaaagacctgagtggctgggagtgatcagccctcacttcgccagacctatctacagctacaagttccgggacagactgaccctgaccagagacagctctctgaccgccgtgtacctggaactgaagggcctgcagcctgacgacagcggcatctacttttgcgccagagatcccttcggcgacagagcccctcactacaactaccacatggacgtgtggggcggaggcacagccgtgatagttagcagcgcatctgtggccgctcctagcgtgttcatcttcccacctagcgacgaggaactgaagtctggcacagccagcgtcgtgtgcctgctgaacaacttctaccccagagaagccaaggtgcagtggaaggtggacaacgccctgcagagcggcaatagccaagagagcgtgaccgagcaggacagcaaggactctacctacagcctgagcagcaccctgacactgagcaaggccgactacgagaagcacaaagtgtacgcctgcgaagtgacccaccagggcctttctagccctgtgaccaagagcttcaaccggggcgagtgcgataagacccacacctgtcctccatgtccagctccagaactgctggccggaccttccgtgttcctgtttcctccaaagcctaaggacaccctgatgatcagcagaacccctgaagtgacctgcgtggtggtggatgtgtctcacgaggaccctgaagtgaagttcaattggtacgtggacggcgtggaagtgcacaacgccaagaccaagcctagagaggaacagtacaacagcacctacagagtggtgtccgtgctgaccgtgctgcaccaggattggctgaacggcaaagagtacaagtgcaaggtgtccaacaaggccctgcctgcccctgaggaaaagaccatcagcaaggccaagggccagcctcgcgaacctcaagtctgtacactgcctcctagccgcgaggaaatgaccaagaaccaggtgtccctgagctgcgccgtgaagggcttttacccttccgatatcgccgtggaatgggagagcaatggccagcctgagaacaactacaagacaacccctcctgtgctggacagcgacggctcattcttcctggtgtccaagctgacagtggacaagagcagatggcagcagggcaacgtgttcagctgcagcgtgctgcatgaagccctgcacagccactacacccagaagtccctgtctctgagccccggcaagtgataa

SEQ ID NO: 170 - RNA, 1458 nt, synthetic construct
  source 1..1458: mol_type = other RNA
atggattggatttggagaatcctgttcctcgtgggcgccgctaccggagcccactcccagggcagactgtttcagtctggcgccgaagtgaaaagaccaggcgcctctgtgcggatcagctgcagagctgacgacgacccctacaccgacgacgataccttcaccaagtactggacccactggatcagacaggcccctggacaaagacctgagtggctgggagtgatcagccctcacttcgccagacctatctacagctacaagttccgggacagactgaccctgaccagagacagctctctgaccgccgtgtacctggaactgaagggcctgcagcctgacgacagcggcatctacttttgcgccagagatcccttcggcgacagagcccctcactacaactaccacatggacgtgtggggcggaggcacagccgtgatagttagcagcgcatctgtggccgctcctagcgtgttcatcttcccacctagcgacgaggaactgaagtctggcacagccagcgtcgtgtgcctgctgaacaacttctaccccagagaagccaaggtgcagtggaaggtggacaacgccctgcagagcggcaatagccaagagagcgtgaccgagcaggacagcaaggactctacctacagcctgagcagcaccctgacactgagcaaggccgactacgagaagcacaaagtgtacgcctgcgaagtgacccaccagggcctttctagccctgtgaccaagagcttcaaccggggcgagtgcgataagacccacacctgtcctccatgtccagctccagaactgctggccggaccttccgtgttcctgtttcctccaaagcctaaggacaccctgatgatcagcagaacccctgaagtgacctgcgtggtggtggatgtgtctcacgaggaccctgaagtgaagttcaattggtacgtggacggcgtggaagtgcacaacgccaagaccaagcctagagaggaacagtacaacagcacctacagagtggtgtccgtgctgaccgtgctgcaccaggattggctgaacggcaaagagtacaagtgcaaggtgtccaacaaggccctgcctgcccctatcgaaaagaccatcagcaaggccaagggccagcctcgcgaacctcaagtctgtacactgcctcctagccgcgaggaaatgaccaagaaccaggtgtccctgagctgcgccgtgaagggcttttacccttccgatatcgccgtggaatgggagagcaatggccagcctgagaacaactacaagacaacccctcctgtgctggacagcgacggctcattcttcctggtgtccaagctgacagtggacaagagcagatggcagcagggcaacgtgttcagctgcagcgtgctgcatgaagccctgcacagccactacacccagaagtccctgtctctgagccccggcaagtgataa

SEQ ID NO: 171 - RNA, 1458 nt, synthetic construct
  source 1..1458: mol_type = other RNA
atggattggatttggagaatcctgttcctcgtgggcgccgctaccggagcccactcccagggcagactgtttcagtctggcgccgaagtgaaaagaccaggcgcctctgtgcggatcagctgcagagctgacgacgacccctacaccgacgacgataccttcaccaagtactggacccactggatcagacaggcccctggacaaagacctgagtggctgggagtgatcagccctcacttcgccagacctatctacagctacaagttccgggacagactgaccctgaccagagacagctctctgaccgccgtgtacctggaactgaagggcctgcagcctgacgacagcggcatctacttttgcgccagagatcccttcggcgacagagcccctcactacaactaccacatggacgtgtggggcggaggcacagccgtgatagttagcagcgcatctgtggccgctcctagcgtgttcatcttcccacctagcgacgaggaactgaagtctggcacagccagcgtcgtgtgcctgctgaacaacttctaccccagagaagccaaggtgcagtggaaggtggacaacgccctgcagagcggcaatagccaagagagcgtgaccgagcaggacagcaaggactctacctacagcctgagcagcaccctgacactgagcaaggccgactacgagaagcacaaagtgtacgcctgcgaagtgacccaccagggcctttctagccctgtgaccaagagcttcaaccggggcgagtgcgataagacccacacctgtcctccatgtccagctccagaactgctgggcggaccttccgtgttcctgtttcctccaaagcctaaggacaccctgatgatcagcagaacccctgaagtgacctgcgtggtggtggatgtgtctcacgaggaccctgaagtgaagttcaattggtacgtggacggcgtggaagtgcacaacgccaagaccaagcctagagaggaacagtacaacagcacctacagagtggtgtccgtgctgaccgtgctgcaccaggattggctgaacggcaaagagtacaagtgcaaggtgtccaacaaggccctgcctgcccctgaggaaaagaccatcagcaaggccaagggccagcctcgcgaacctcaagtctgtacactgcctcctagccgcgaggaaatgaccaagaaccaggtgtccctgagctgcgccgtgaagggcttttacccttccgatatcgccgtggaatgggagagcaatggccagcctgagaacaactacaagacaacccctcctgtgctggacagcgacggctcattcttcctggtgtccaagctgacagtggacaagagcagatggcagcagggcaacgtgttcagctgcagcgtgctgcatgaagccctgcacagccactacacccagaagtccctgtctctgagccccggcaagtgataa

SEQ ID NO: 172 - RNA, 1458 nt, synthetic construct
  source 1..1458: mol_type = other RNA
atggattggatttggagaatcctgttcctcgtgggcgccgctaccggagcccactcccagggcagactgtttcagtctggcgccgaagtgaaaagaccaggcgcctctgtgcggatcagctgcagagctgacgacgacccctacaccgacgacgataccttcaccaagtactggacccactggatcagacaggcccctggacaaagacctgagtggctgggagtgatcagccctcacttcgccagacctatctacagctacaagttccgggacagactgaccctgaccagagacagctctctgaccgccgtgtacctggaactgaagggcctgcagcctgacgacagcggcatctacttttgcgccagagatcccttcggcgacagagcccctcactacaactaccacatggacgtgtggggcggaggcacagccgtgatagttagcagcgcatctgtggccgctcctagcgtgttcatcttcccacctagcgacgaggaactgaagtctggcacagccagcgtcgtgtgcctgctgaacaacttctaccccagagaagccaaggtgcagtggaaggtggacaacgccctgcagagcggcaatagccaagagagcgtgaccgagcaggacagcaaggactctacctacagcctgagcagcaccctgacactgagcaaggccgactacgagaagcacaaagtgtacgcctgcgaagtgacccaccagggcctttctagccctgtgaccaagagcttcaaccggggcgagtgcgataagacccacacctgtcctccatgtccagctccagaactgctcggcggaccttccgtgttcctgtttcctccaaagcctaaggacaccctgatgatcagcagaacccctgaagtgacctgcgtggtggtggatgtgtctcacgaggacccagaagtgaagttcaattggtacgtggacggcgtggaagtgcacaacgccaagaccaagcctagagaggaacagtacaacagcacctacagagtggtgtccgtgctgacagtgctgcaccaggattggctgaacggcaaagagtacaagtgcaaggtgtccaacaaggccctgcctgctcctatcgagaaaaccatcagcaaggccaagggccagcctagggaaccccaggtttacaccctgcctccatgccgcgaggaaatgaccaagaaccaggtgtccctgtggtgcctggtcaagggcttctacccttccgatatcgccgtggaatgggagagcaatggccagcctgagaacaactacaagacaacccctcctgtgctggacagcgacggctcattcttcctgtacagcaagctgacagtggacaagagcagatggcagcagggcaacgtgttcagctgcagcgtgctgcatgaagccctgcacagccactacacccagaagtccctgtctctgagccccggcaagtgataa

SEQ ID NO: 173 - RNA, 1458 nt, synthetic construct
  source 1..1458: mol_type = other RNA
atggattggatttggagaatcctgttcctcgtgggcgccgctaccggagcccactcccagggcagactgtttcagtctggcgccgaagtgaaaagaccaggcgcctctgtgcggatcagctgcagagctgacgacgacccctacaccgacgacgataccttcaccaagtactggacccactggatcagacaggcccctggacaaagacctgagtggctgggagtgatcagccctcacttcgccagacctatctacagctacaagttccgggacagactgaccctgaccagagacagctctctgaccgccgtgtacctggaactgaagggcctgcagcctgacgacagcggcatctacttttgcgccagagatcccttcggcgacagagcccctcactacaactaccacatggacgtgtggggcggaggcacagccgtgatagttagcagcgcatctgtggccgctcctagcgtgttcatcttcccacctagcgacgaggaactgaagtctggcacagccagcgtcgtgtgcctgctgaacaacttctaccccagagaagccaaggtgcagtggaaggtggacaacgccctgcagagcggcaatagccaagagagcgtgaccgagcaggacagcaaggactctacctacagcctgagcagcaccctgacactgagcaaggccgactacgagaagcacaaagtgtacgcctgcgaagtgacccaccagggcctttctagccctgtgaccaagagcttcaaccggggcgagtgcgataagacccacacctgtcctccatgtccagctccagaactgctggccggaccttccgtgttcctgtttcctccaaagcctaaggacaccctgatgatcagcagaacccctgaagtgacctgcgtggtggtggatgtgtctcacgaggaccctgaagtgaagttcaattggtacgtggacggcgtggaagtgcacaacgccaagaccaagcctagagaggaacagtacaacagcacctacagagtggtgtccgtgctgaccgtgctgcaccaggattggctgaacggcaaagagtacaagtgcaaggtgtccaacaaggccctgcctctgcctgaggaaaagaccatcagcaaggccaagggccagcctagggaaccccaggtttacaccctgcctccatgccgcgaggaaatgaccaagaaccaggtgtccctgtggtgcctggtcaagggcttctacccttccgatatcgccgtggaatgggagagcaatggccagcctgagaacaactacaagacaacccctcctgtgctggacagcgacggctcattcttcctgtacagcaagctgacagtggacaagagcagatggcagcagggcaacgtgttcagctgcagcgtgctgcatgaagccctgcacagccactacacccagaagtccctgtctctgagccccggcaagtgataa

SEQ ID NO: 174 - RNA, 1458 nt, synthetic construct
  source 1..1458: mol_type = other RNA
atggattggatttggagaatcctgttcctcgtgggcgccgctaccggagcccactcccagggcagactgtttcagtctggcgccgaagtgaaaagaccaggcgcctctgtgcggatcagctgcagagctgacgacgacccctacaccgacgacgataccttcaccaagtactggacccactggatcagacaggcccctggacaaagacctgagtggctgggagtgatcagccctcacttcgccagacctatctacagctacaagttccgggacagactgaccctgaccagagacagctctctgaccgccgtgtacctggaactgaagggcctgcagcctgacgacagcggcatctacttttgcgccagagatcccttcggcgacagagcccctcactacaactaccacatggacgtgtggggcggaggcacagccgtgatagttagcagcgcatctgtggccgctcctagcgtgttcatcttcccacctagcgacgaggaactgaagtctggcacagccagcgtcgtgtgcctgctgaacaacttctaccccagagaagccaaggtgcagtggaaggtggacaacgccctgcagagcggcaatagccaagagagcgtgaccgagcaggacagcaaggactctacctacagcctgagcagcaccctgacactgagcaaggccgactacgagaagcacaaagtgtacgcctgcgaagtgacccaccagggcctttctagccctgtgaccaagagcttcaaccggggcgagtgcgataagacccacacctgtcctccatgtccagctccagaactgctggccggaccttccgtgttcctgtttcctccaaagcctaaggacaccctgatgatcagcagaacccctgaagtgacctgcgtggtggtggatgtgtctcacgaggaccctgaagtgaagttcaattggtacgtggacggcgtggaagtgcacaacgccaagaccaagcctagagaggaacagtacaacagcacctacagagtggtgtccgtgctgaccgtgctgcaccaggattggctgaacggcaaagagtacaagtgcaaggtgtccaacaaggccctgcctgcccctgaggaaaagaccatcagcaaggccaagggccagcctagggaaccccaggtttacaccctgcctccatgccgcgaggaaatgaccaagaaccaggtgtccctgtggtgcctggtcaagggcttctacccttccgatatcgccgtggaatgggagagcaatggccagcctgagaacaactacaagacaacccctcctgtgctggacagcgacggctcattcttcctgtacagcaagctgacagtggacaagagcagatggcagcagggcaacgtgttcagctgcagcgtgctgcatgaagccctgcacagccactacacccagaagtccctgtctctgagccccggcaagtgataa

SEQ ID NO: 175 - RNA, 1458 nt, synthetic construct
  source 1..1458: mol_type = other RNA
atggattggatttggagaatcctgttcctcgtgggcgccgctaccggagcccactcccagggcagactgtttcagtctggcgccgaagtgaaaagaccaggcgcctctgtgcggatcagctgcagagctgacgacgacccctacaccgacgacgataccttcaccaagtactggacccactggatcagacaggcccctggacaaagacctgagtggctgggagtgatcagccctcacttcgccagacctatctacagctacaagttccgggacagactgaccctgaccagagacagctctctgaccgccgtgtacctggaactgaagggcctgcagcctgacgacagcggcatctacttttgcgccagagatcccttcggcgacagagcccctcactacaactaccacatggacgtgtggggcggaggcacagccgtgatagttagcagcgcatctgtggccgctcctagcgtgttcatcttcccacctagcgacgaggaactgaagtctggcacagccagcgtcgtgtgcctgctgaacaacttctaccccagagaagccaaggtgcagtggaaggtggacaacgccctgcagagcggcaatagccaagagagcgtgaccgagcaggacagcaaggactctacctacagcctgagcagcaccctgacactgagcaaggccgactacgagaagcacaaagtgtacgcctgcgaagtgacccaccagggcctttctagccctgtgaccaagagcttcaaccggggcgagtgcgataagacccacacctgtcctccatgtccagctccagaactgctggccggaccttccgtgttcctgtttcctccaaagcctaaggacaccctgatgatcagcagaacccctgaagtgacctgcgtggtggtggatgtgtctcacgaggaccctgaagtgaagttcaattggtacgtggacggcgtggaagtgcacaacgccaagaccaagcctagagaggaacagtacaacagcacctacagagtggtgtccgtgctgaccgtgctgcaccaggattggctgaacggcaaagagtacaagtgcaaggtgtccaacaaggccctgcctgcccctatcgaaaagaccatcagcaaggccaagggccagcctagggaaccccaggtttacaccctgcctccatgccgcgaggaaatgaccaagaaccaggtgtccctgtggtgcctggtcaagggcttctacccttccgatatcgccgtggaatgggagagcaatggccagcctgagaacaactacaagacaacccctcctgtgctggacagcgacggctcattcttcctgtacagcaagctgacagtggacaagagcagatggcagcagggcaacgtgttcagctgcagcgtgctgcatgaagccctgcacagccactacacccagaagtccctgtctctgagccccggcaagtgataa

SEQ ID NO: 176 - RNA, 1458 nt, synthetic construct
  source 1..1458: mol_type = other RNA
atggattggatttggagaatcctgttcctcgtgggcgccgctaccggagcccactcccagggcagactgtttcagtctggcgccgaagtgaaaagaccaggcgcctctgtgcggatcagctgcagagctgacgacgacccctacaccgacgacgataccttcaccaagtactggacccactggatcagacaggcccctggacaaagacctgagtggctgggagtgatcagccctcacttcgccagacctatctacagctacaagttccgggacagactgaccctgaccagagacagctctctgaccgccgtgtacctggaactgaagggcctgcagcctgacgacagcggcatctacttttgcgccagagatcccttcggcgacagagcccctcactacaactaccacatggacgtgtggggcggaggcacagccgtgatagttagcagcgcatctgtggccgctcctagcgtgttcatcttcccacctagcgacgaggaactgaagtctggcacagccagcgtcgtgtgcctgctgaacaacttctaccccagagaagccaaggtgcagtggaaggtggacaacgccctgcagagcggcaatagccaagagagcgtgaccgagcaggacagcaaggactctacctacagcctgagcagcaccctgacactgagcaaggccgactacgagaagcacaaagtgtacgcctgcgaagtgacccaccagggcctttctagccctgtgaccaagagcttcaaccggggcgagtgcgataagacccacacctgtcctccatgtccagctccagaactgctgggcggaccttccgtgttcctgtttcctccaaagcctaaggacaccctgatgatcagcagaacccctgaagtgacctgcgtggtggtggatgtgtctcacgaggaccctgaagtgaagttcaattggtacgtggacggcgtggaagtgcacaacgccaagaccaagcctagagaggaacagtacaacagcacctacagagtggtgtccgtgctgaccgtgctgcaccaggattggctgaacggcaaagagtacaagtgcaaggtgtccaacaaggccctgcctgcccctgaggaaaagaccatcagcaaggccaagggccagcctagggaaccccaggtttacaccctgcctccatgccgcgaggaaatgaccaagaaccaggtgtccctgtggtgcctggtcaagggcttctacccttccgatatcgccgtggaatgggagagcaatggccagcctgagaacaactacaagacaacccctcctgtgctggacagcgacggctcattcttcctgtacagcaagctgacagtggacaagagcagatggcagcagggcaacgtgttcagctgcagcgtgctgcatgaagccctgcacagccactacacccagaagtccctgtctctgagccccggcaagtgataa

SEQ ID NO: 177 - RNA, 1458 nt, synthetic construct; identical to SEQ ID NO: 161
  source 1..1458: mol_type = other RNA

SEQ ID NO: 178 - RNA, 1458 nt, synthetic construct; identical to SEQ ID NO: 162
  source 1..1458: mol_type = other RNA

SEQ ID NO: 179 - RNA, 1458 nt, synthetic construct; identical to SEQ ID NO: 163
  source 1..1458: mol_type = other RNA

SEQ ID NO: 180 - RNA, 1458 nt, synthetic construct; identical to SEQ ID NO: 164
  source 1..1458: mol_type = other RNA

SEQ ID NO: 181 - RNA, 1458 nt, synthetic construct; identical to SEQ ID NO: 165
  source 1..1458: mol_type = other RNA

SEQ ID NO: 182 - RNA, 1458 nt, synthetic construct; identical to SEQ ID NO: 166
  source 1..1458: mol_type = other RNA

SEQ ID NO: 183 - RNA, 1458 nt, synthetic construct; identical to SEQ ID NO: 167
  source 1..1458: mol_type = other RNA

SEQ ID NO: 184 - RNA, 1458 nt, synthetic construct; identical to SEQ ID NO: 168
  source 1..1458: mol_type = other RNA

SEQ ID NO: 185 - RNA, 1458 nt, synthetic construct; identical to SEQ ID NO: 169
  source 1..1458: mol_type = other RNA

SEQ ID NO: 186 - RNA, 1458 nt, synthetic construct; identical to SEQ ID NO: 170
  source 1..1458: mol_type = other RNA

SEQ ID NO: 187 - RNA, 1458 nt, synthetic construct; identical to SEQ ID NO: 171
  source 1..1458: mol_type = other RNA

SEQ ID NO: 188 - RNA, 1458 nt, synthetic construct; identical to SEQ ID NO: 172
  source 1..1458: mol_type = other RNA

SEQ ID NO: 189 - RNA, 1458 nt, synthetic construct; identical to SEQ ID NO: 173
  source 1..1458: mol_type = other RNA

SEQ ID NO: 190 - RNA, 1458 nt, synthetic construct; identical to SEQ ID NO: 174
  source 1..1458: mol_type = other RNA

SEQ ID NO: 191 - RNA, 1458 nt, synthetic construct; identical to SEQ ID NO: 175
  source 1..1458: mol_type = other RNA

SEQ ID NO: 192 - RNA, 1458 nt, synthetic construct; identical to SEQ ID NO: 176
  source 1..1458: mol_type = other RNA

SEQ ID NO: 193 - RNA, 1458 nt, synthetic construct
  source 1..1458: mol_type = other RNA
atggattggatttggagaatcctgttcctcgtgggcgccgctaccggagcccactcccagggcagactgtttcagtctggcgccgaagtgaaaagaccaggcgcctctgtgcggatcagctgcagagctgacgacgacccctacaccgacgacgataccttcaccaagtactggacccactggatcagacaggcccctggacaaagacctgagtggctgggagtgatcagccctcacttcgccagacctatctacagctacaagttccgggacagactgaccctgaccagagacagctctctgaccgccgtgtacctggaactgaagggcctgcagcctgacgacagcggcatctacttttgcgccagagatcccttcggcgacagagcccctcactacaactaccacatggacgtgtggggcggaggcacagccgtgatagttagcagcgcatctgtggccgctcctagcgtgttcatcttcccacctagcgacgaggaactgaagtctggcacagccagcgtcgtgtgcctgctgaacaacttctaccccagagaagccaaggtgcagtggaaggtggacaacgccctgcagagcggcaatagccaagagagcgtgaccgagcaggacagcaaggactctacctacagcctgagcagcaccctgacactgagcaaggccgactacgagaagcacaaagtgtacgcctgcgaagtgacccaccagggcctttctagccctgtgaccaagagcttcaaccggggcgagtgcgataagacccacacctgtcctccatgtccagctccagaactgctcggcggaccttccgtgttcctgtttcctccaaagcctaaggacaccctgatgatcagcagaacccctgaagtgacctgcgtggtggtggatgtgtctcacgaggacccagaagtgaagttcaattggtacgtggacggcgtggaagtgcacaacgccaagaccaagcctagagaggaacagtacaacagcacctacagagtggtgtccgtgctgacagtgctgcaccaggattggctgaacggcaaagagtacaagtgcaaggtgtccaacaaggccctgcctgctcctatcgagaaaaccatcagcaaggccaagggccagcctagggaaccccaggtttacacactgcctccaagccgcgacgaactgaccaagaaccaggtgtccctgacctgcctcgtgaagggcttctacccttccgatatcgccgtggaatgggagagcaatggccagcctgagaacaactacaagacaacccctcctgtgctggacagcgacggctcattcttcctgtacagcaagctgactgtggataagtcccggtggcagcagggcaacgtgttcagctgttctgtgatgcacgaagccctgcacaaccactacacccagaaaagcctgtctctgagccccggcaagtgataa

SEQ ID NO: 194 - RNA, 1458 nt, synthetic construct
  source 1..1458: mol_type = other RNA
atggattggatttggagaatcctgttcctcgtgggcgccgctaccggagcccactcccagggcagactgtttcagtctggcgccgaagtgaaaagaccaggcgcctctgtgcggatcagctgcagagctgacgacgacccctacaccgacgacgataccttcaccaagtactggacccactggatcagacaggcccctggacaaagacctgagtggctgggagtgatcagccctcacttcgccagacctatctacagctacaagttccgggacagactgaccctgaccagagacagctctctgaccgccgtgtacctggaactgaagggcctgcagcctgacgacagcggcatctacttttgcgccagagatcccttcggcgacagagcccctcactacaactaccacatggacgtgtggggcggaggcacagccgtgatagttagcagcgcatctgtggccgctcctagcgtgttcatcttcccacctagcgacgaggaactgaagtctggcacagccagcgtcgtgtgcctgctgaacaacttctaccccagagaagccaaggtgcagtggaaggtggacaacgccctgcagagcggcaatagccaagagagcgtgaccgagcaggacagcaaggactctacctacagcctgagcagcaccctgacactgagcaaggccgactacgagaagcacaaagtgtacgcctgcgaagtgacccaccagggcctttctagccctgtgaccaagagcttcaaccggggcgagtgcgataagacccacacctgtcctccatgtccagctccagaactgctcggcggaccttccgtgttcctgtttcctccaaagcctaaggacaccctgatgatcagcagaacccctgaagtgacctgcgtggtggtggatgtgtctcacgaggacccagaagtgaagttcaattggtacgtggacggcgtggaagtgcacaacgccaagaccaagcctagagaggaacagtacaacagcacctacagagtggtgtccgtgctgacagtgctgcaccaggattggctgaacggcaaagagtacaagtgcaaggtgtccaacaaggccctgcctgctcctatcgagaaaaccatcagcaaggccaagggccagcctagggaaccccaggtttacacactgcctccaagccgcgacgaactgaccaagaaccaggtgtccctgacctgcctcgtgaagggcttctacccttccgatatcgccgtggaatgggagagcaatggccagcctgagaacaactacaagacaacccctcctgtgctggacagcgacggctcattcttcctgtacagcaagctgaccgtggacaagtccagatggcagcagggcaacgtgttcagctgtagcgtgctgcacgaagccctgcacagccactacacccagaaaagcctgtctctgagccccggcaaatgataa

SEQ ID NO: 195 - RNA, 1458 nt, synthetic construct
  source 1..1458: mol_type = other RNA
atggattggatttggagaatcctgttcctcgtgggcgccgctaccggagcccactcccagggcagactgtttcagtctggcgccgaagtgaaaagaccaggcgcctctgtgcggatcagctgcagagctgacgacgacccctacaccgacgacgataccttcaccaagtactggacccactggatcagacaggcccctggacaaagacctgagtggctgggagtgatcagccctcacttcgccagacctatctacagctacaagttccgggacagactgaccctgaccagagacagctctctgaccgccgtgtacctggaactgaagggcctgcagcctgacgacagcggcatctacttttgcgccagagatcccttcggcgacagagcccctcactacaactaccacatggacgtgtggggcggaggcacagccgtgatagttagcagcgcatctgtggccgctcctagcgtgttcatcttcccacctagcgacgaggaactgaagtctggcacagccagcgtcgtgtgcctgctgaacaacttctaccccagagaagccaaggtgcagtggaaggtggacaacgccctgcagagcggcaatagccaagagagcgtgaccgagcaggacagcaaggactctacctacagcctgagcagcaccctgacactgagcaaggccgactacgagaagcacaaagtgtacgcctgcgaagtgacccaccagggcctttctagccctgtgaccaagagcttcaaccggggcgagtgcgataagacccacacctgtcctccatgtccagctccagaactgctggccggaccttccgtgttcctgtttcctccaaagcctaaggacaccctgatgatcagcagaacccctgaagtgacctgcgtggtggtggatgtgtctcacgaggaccctgaagtgaagttcaattggtacgtggacggcgtggaagtgcacaacgccaagaccaagcctagagaggaacagtacaacagcacctacagagtggtgtccgtgctgaccgtgctgcaccaggattggctgaacggcaaagagtacaagtgcaaggtgtccaacaaggccctgcctctgcctgaggaaaagaccatcagcaaggccaagggccagcctagggaaccccaggtttacacactgcctccaagccgcgacgaactgaccaagaaccaggtgtccctgacctgcctcgtgaagggcttctacccttccgatatcgccgtggaatgggagagcaatggccagcctgagaacaactacaagacaacccctcctgtgctggacagcgacggctcattcttcctgtacagcaagctgaccgtggacaagtccagatggcagcagggcaacgtgttcagctgtagcgtgctgcacgaagccctgcacagccactacacccagaaaagcctgtctctgagccccggcaaatgataa

SEQ ID NO: 196 - RNA, 1458 nt, synthetic construct
  source 1..1458: mol_type = other RNA
atggattggatttggagaatcctgttcctcgtgggcgccgctaccggagcccactcccagggcagactgtttcagtctggcgccgaagtgaaaagaccaggcgcctctgtgcggatcagctgcagagctgacgacgacccctacaccgacgacgataccttcaccaagtactggacccactggatcagacaggcccctggacaaagacctgagtggctgggagtgatcagccctcacttcgccagacctatctacagctacaagttccgggacagactgaccctgaccagagacagctctctgaccgccgtgtacctggaactgaagggcctgcagcctgacgacagcggcatctacttttgcgccagagatcccttcggcgacagagcccctcactacaactaccacatggacgtgtggggcggaggcacagccgtgatagttagcagcgcatctgtggccgctcctagcgtgttcatcttcccacctagcgacgaggaactgaagtctggcacagccagcgtcgtgtgcctgctgaacaacttctaccccagagaagccaaggtgcagtggaaggtggacaacgccctgcagagcggcaatagccaagagagcgtgaccgagcaggacagcaaggactctacctacagcctgagcagcaccctgacactgagcaaggccgactacgagaagcacaaagtgtacgcctgcgaagtgacccaccagggcctttctagccctgtgaccaagagcttcaaccggggcgagtgcgataagacccacacctgtcctccatgtccagctccagaactgctggccggaccttccgtgttcctgtttcctccaaagcctaaggacaccctgatgatcagcagaacccctgaagtgacctgcgtggtggtggatgtgtctcacgaggaccctgaagtgaagttcaattggtacgtggacggcgtggaagtgcacaacgccaagaccaagcctagagaggaacagtacaacagcacctacagagtggtgtccgtgctgaccgtgctgcaccaggattggctgaacggcaaagagtacaagtgcaaggtgtccaacaaggccctgcctgcccctgaggaaaagaccatcagcaaggccaagggccagcctagggaaccccaggtttacacactgcctccaagccgcgacgaactgaccaagaaccaggtgtccctgacctgcctcgtgaagggcttctacccttccgatatcgccgtggaatgggagagcaatggccagcctgagaacaactacaagacaacccctcctgtgctggacagcgacggctcattcttcctgtacagcaagctgaccgtggacaagtccagatggcagcagggcaacgtgttcagctgtagcgtgctgcacgaagccctgcacagccactacacccagaaaagcctgtctctgagccccggcaaatgataa

SEQ ID NO: 197 - RNA, 1458 nt, synthetic construct
  source 1..1458: mol_type = other RNA
atggattggatttggagaatcctgttcctcgtgggcgccgctaccggagcccactcccagggcagactgtttcagtctggcgccgaagtgaaaagaccaggcgcctctgtgcggatcagctgcagagctgacgacgacccctacaccgacgacgataccttcaccaagtactggacccactggatcagacaggcccctggacaaagacctgagtggctgggagtgatcagccctcacttcgccagacctatctacagctacaagttccgggacagactgaccctgaccagagacagctctctgaccgccgtgtacctggaactgaagggcctgcagcctgacgacagcggcatctacttttgcgccagagatcccttcggcgacagagcccctcactacaactaccacatggacgtgtggggcggaggcacagccgtgatagttagcagcgcatctgtggccgctcctagcgtgttcatcttcccacctagcgacgaggaactgaagtctggcacagccagcgtcgtgtgcctgctgaacaacttctaccccagagaagccaaggtgcagtggaaggtggacaacgccctgcagagcggcaatagccaagagagcgtgaccgagcaggacagcaaggactctacctacagcctgagcagcaccctgacactgagcaaggccgactacgagaagcacaaagtgtacgcctgcgaagtgacccaccagggcctttctagccctgtgaccaagagcttcaaccggggcgagtgcgataagacccacacctgtcctccatgtccagctccagaactgctggccggaccttccgtgttcctgtttcctccaaagcctaaggacaccctgatgatcagcagaacccctgaagtgacctgcgtggtggtggatgtgtctcacgaggaccctgaagtgaagttcaattggtacgtggacggcgtggaagtgcacaacgccaagaccaagcctagagaggaacagtacaacagcacctacagagtggtgtccgtgctgaccgtgctgcaccaggattggctgaacggcaaagagtacaagtgcaaggtgtccaacaaggccctgcctgcccctatcgaaaagaccatcagcaaggccaagggccagcctagggaaccccaggtttacacactgcctccaagccgcgacgaactgaccaagaaccaggtgtccctgacctgcctcgtgaagggcttctacccttccgatatcgccgtggaatgggagagcaatggccagcctgagaacaactacaagacaacccctcctgtgctggacagcgacggctcattcttcctgtacagcaagctgaccgtggacaagtccagatggcagcagggcaacgtgttcagctgtagcgtgctgcacgaagccctgcacagccactacacccagaaaagcctgtctctgagccccggcaaatgataa

SEQ ID NO: 198 - RNA, 1458 nt, synthetic construct
  source 1..1458: mol_type = other RNA
atggattggatttggagaatcctgttcctcgtgggcgccgctaccggagcccactcccagggcagactgtttcagtctggcgccgaagtgaaaagaccaggcgcctctgtgcggatcagctgcagagctgacgacgacccctacaccgacgacgataccttcaccaagtactggacccactggatcagacaggcccctggacaaagacctgagtggctgggagtgatcagccctcacttcgccagacctatctacagctacaagttccgggacagactgaccctgaccagagacagctctctgaccgccgtgtacctggaactgaagggcctgcagcctgacgacagcggcatctacttttgcgccagagatcccttcggcgacagagcccctcactacaactaccacatggacgtgtggggcggaggcacagccgtgatagttagcagcgcatctgtggccgctcctagcgtgttcatcttcccacctagcgacgaggaactgaagtctggcacagccagcgtcgtgtgcctgctgaacaacttctaccccagagaagccaaggtgcagtggaaggtggacaacgccctgcagagcggcaatagccaagagagcgtgaccgagcaggacagcaaggactctacctacagcctgagcagcaccctgacactgagcaaggccgactacgagaagcacaaagtgtacgcctgcgaagtgacccaccagggcctttctagccctgtgaccaagagcttcaaccggggcgagtgcgataagacccacacctgtcctccatgtccagctccagaactgctgggcggaccttccgtgttcctgtttcctccaaagcctaaggacaccctgatgatcagcagaacccctgaagtgacctgcgtggtggtggatgtgtctcacgaggaccctgaagtgaagttcaattggtacgtggacggcgtggaagtgcacaacgccaagaccaagcctagagaggaacagtacaacagcacctacagagtggtgtccgtgctgaccgtgctgcaccaggattggctgaacggcaaagagtacaagtgcaaggtgtccaacaaggccctgcctgcccctgaggaaaagaccatcagcaaggccaagggccagcctagggaaccccaggtttacacactgcctccaagccgcgacgaactgaccaagaaccaggtgtccctgacctgcctcgtgaagggcttctacccttccgatatcgccgtggaatgggagagcaatggccagcctgagaacaactacaagacaacccctcctgtgctggacagcgacggctcattcttcctgtacagcaagctgaccgtggacaagtccagatggcagcagggcaacgtgttcagctgtagcgtgctgcacgaagccctgcacagccactacacccagaaaagcctgtctctgagccccggcaaatgataa

SEQ ID NO: 199 - RNA, 1458 nt, synthetic construct
  source 1..1458: mol_type = other RNA
atggattggatttggagaatcctgttcctcgtgggcgccgctaccggagcccactcccagggcagactgtttcagtctggcgccgaagtgaaaagaccaggcgcctctgtgcggatcagctgcagagctgacgacgacccctacaccgacgacgataccttcaccaagtactggacccactggatcagacaggcccctggacaaagacctgagtggctgggagtgatcagccctcacttcgccagacctatctacagctacaagttccgggacagactgaccctgaccagagacagctctctgaccgccgtgtacctggaactgaagggcctgcagcctgacgacagcggcatctacttttgcgccagagatcccttcggcgacagagcccctcactacaactaccacatggacgtgtggggcggaggcacagccgtgatagttagcagcgcatctgtggccgctcctagcgtgttcatcttcccacctagcgacgaggaactgaagtctggcacagccagcgtcgtgtgcctgctgaacaacttctaccccagagaagccaaggtgcagtggaaggtggacaacgccctgcagagcggcaatagccaagagagcgtgaccgagcaggacagcaaggactctacctacagcctgagcagcaccctgacactgagcaaggccgactacgagaagcacaaagtgtacgcctgcgaagtgacccaccagggcctttctagccctgtgaccaagagcttcaaccggggcgagtgcgataagacccacacctgtcctccatgtccagctccagaactgctcggcggaccttccgtgttcctgtttcctccaaagcctaaggacaccctgatgatcagcagaacccctgaagtgacctgcgtggtggtggatgtgtctcacgaggacccagaagtgaagttcaattggtacgtggacggcgtggaagtgcacaacgccaagaccaagcctagagaggaacagtacaacagcacctacagagtggtgtccgtgctgacagtgctgcaccaggattggctgaacggcaaagagtacaagtgcaaggtgtccaacaaggccctgcctgctcctatcgagaaaaccatcagcaaggccaagggccagcctcgcgaacctcaagtctgtacactgcctcctagccgcgacgaactgaccaagaaccaggtgtccctgagctgcgccgtgaagggcttttacccttccgatatcgccgtggaatgggagagcaatggccagcctgagaacaactacaagacaacccctcctgtgctggacagcgacggctcattcttcctggtgtccaagctgacagtggacaagagcagatggcagcagggcaacgtgttcagctgcagcgtgctgcatgaagccctgcacagccactacacccagaagtccctgtctctgagccccggcaagtgataa

SEQ ID NO: 200 - RNA, 1458 nt, synthetic construct
  source 1..1458: mol_type = other RNA
atggattggatttggagaatcctgttcctcgtgggcgccgctaccggagcccactcccagggcagactgtttcagtctggcgccgaagtgaaaagaccaggcgcctctgtgcggatcagctgcagagctgacgacgacccctacaccgacgacgataccttcaccaagtactggacccactggatcagacaggcccctggacaaagacctgagtggctgggagtgatcagccctcacttcgccagacctatctacagctacaagttccgggacagactgaccctgaccagagacagctctctgaccgccgtgtacctggaactgaagggcctgcagcctgacgacagcggcatctacttttgcgccagagatcccttcggcgacagagcccctcactacaactaccacatggacgtgtggggcggaggcacagccgtgatagttagcagcgcatctgtggccgctcctagcgtgttcatcttcccacctagcgacgaggaactgaagtctggcacagccagcgtcgtgtgcctgctgaacaacttctaccccagagaagccaaggtgcagtggaaggtggacaacgccctgcagagcggcaatagccaagagagcgtgaccgagcaggacagcaaggactctacctacagcctgagcagcaccctgacactgagcaaggccgactacgagaagcacaaagtgtacgcctgcgaagtgacccaccagggcctttctagccctgtgaccaagagcttcaaccggggcgagtgcgataagacccacacctgtcctccatgtccagctccagaactgctggccggaccttccgtgttcctgtttcctccaaagcctaaggacaccctgatgatcagcagaacccctgaagtgacctgcgtggtggtggatgtgtctcacgaggaccctgaagtgaagttcaattggtacgtggacggcgtggaagtgcacaacgccaagaccaagcctagagaggaacagtacaacagcacctacagagtggtgtccgtgctgaccgtgctgcaccaggattggctgaacggcaaagagtacaagtgcaaggtgtccaacaaggccctgcctctgcctgaggaaaagaccatcagcaaggccaagggccagcctcgcgaacctcaagtctgtacactgcctcctagccgcgacgaactgaccaagaaccaggtgtccctgagctgcgccgtgaagggcttttacccttccgatatcgccgtggaatgggagagcaatggccagcctgagaacaactacaagacaacccctcctgtgctggacagcgacggctcattcttcctggtgtccaagctgacagtggacaagagcagatggcagcagggcaacgtgttcagctgcagcgtgctgcatgaagccctgcacagccactacacccagaagtccctgtctctgagccccggcaagtgataa

SEQ ID NO: 201 - RNA, 1458 nt, synthetic construct
  source 1..1458: mol_type = other RNA
atggattggatttggagaatcctgttcctcgtgggcgccgctaccggagcccactcccagggcagactgtttcagtctggcgccgaagtgaaaagaccaggcgcctctgtgcggatcagctgcagagctgacgacgacccctacaccgacgacgataccttcaccaagtactggacccactggatcagacaggcccctggacaaagacctgagtggctgggagtgatcagccctcacttcgccagacctatctacagctacaagttccgggacagactgaccctgaccagagacagctctctgaccgccgtgtacctggaactgaagggcctgcagcctgacgacagcggcatctacttttgcgccagagatcccttcggcgacagagcccctcactacaactaccacatggacgtgtggggcggaggcacagccgtgatagttagcagcgcatctgtggccgctcctagcgtgttcatcttcccacctagcgacgaggaactgaagtctggcacagccagcgtcgtgtgcctgctgaacaacttctaccccagagaagccaaggtgcagtggaaggtggacaacgccctgcagagcggcaatagccaagagagcgtgaccgagcaggacagcaaggactctacctacagcctgagcagcaccctgacactgagcaaggccgactacgagaagcacaaagtgtacgcctgcgaagtgacccaccagggcctttctagccctgtgaccaagagcttcaaccggggcgagtgcgataagacccacacctgtcctccatgtccagctccagaactgctggccggaccttccgtgttcctgtttcctccaaagcctaaggacaccctgatgatcagcagaacccctgaagtgacctgcgtggtggtggatgtgtctcacgaggaccctgaagtgaagttcaattggtacgtggacggcgtggaagtgcacaacgccaagaccaagcctagagaggaacagtacaacagcacctacagagtggtgtccgtgctgaccgtgctgcaccaggattggctgaacggcaaagagtacaagtgcaaggtgtccaacaaggccctgcctgcccctgaggaaaagaccatcagcaaggccaagggccagcctcgcgaacctcaagtctgtacactgcctcctagccgcgacgaactgaccaagaaccaggtgtccctgagctgcgccgtgaagggcttttacccttccgatatcgccgtggaatgggagagcaatggccagcctgagaacaactacaagacaacccctcctgtgctggacagcgacggctcattcttcctggtgtccaagctgacagtggacaagagcagatggcagcagggcaacgtgttcagctgcagcgtgctgcatgaagccctgcacagccactacacccagaagtccctgtctctgagccccggcaagtgataa

SEQ ID NO: 202 - RNA, 1458 nt, synthetic construct
  source 1..1458: mol_type = other RNA
atggattggatttggagaatcctgttcctcgtgggcgccgctaccggagcccactcccagggcagactgtttcagtctggcgccgaagtgaaaagaccaggcgcctctgtgcggatcagctgcagagctgacgacgacccctacaccgacgacgataccttcaccaagtactggacccactggatcagacaggcccctggacaaagacctgagtggctgggagtgatcagccctcacttcgccagacctatctacagctacaagttccgggacagactgaccctgaccagagacagctctctgaccgccgtgtacctggaactgaagggcctgcagcctgacgacagcggcatctacttttgcgccagagatcccttcggcgacagagcccctcactacaactaccacatggacgtgtggggcggaggcacagccgtgatagttagcagcgcatctgtggccgctcctagcgtgttcatcttcccacctagcgacgaggaactgaagtctggcacagccagcgtcgtgtgcctgctgaacaacttctaccccagagaagccaaggtgcagtggaaggtggacaacgccctgcagagcggcaatagccaagagagcgtgaccgagcaggacagcaaggactctacctacagcctgagcagcaccctgacactgagcaaggccgactacgagaagcacaaagtgtacgcctgcgaagtgacccaccagggcctttctagccctgtgaccaagagcttcaaccggggcgagtgcgataagacccacacctgtcctccatgtccagctccagaactgctggccggaccttccgtgttcctgtttcctccaaagcctaaggacaccctgatgatcagcagaacccctgaagtgacctgcgtggtggtggatgtgtctcacgaggaccctgaagtgaagttcaattggtacgtggacggcgtggaagtgcacaacgccaagaccaagcctagagaggaacagtacaacagcacctacagagtggtgtccgtgctgaccgtgctgcaccaggattggctgaacggcaaagagtacaagtgcaaggtgtccaacaaggccctgcctgcccctatcgaaaagaccatcagcaaggccaagggccagcctcgcgaacctcaagtctgtacactgcctcctagccgcgacgaactgaccaagaaccaggtgtccctgagctgcgccgtgaagggcttttacccttccgatatcgccgtggaatgggagagcaatggccagcctgagaacaactacaagacaacccctcctgtgctggacagcgacggctcattcttcctggtgtccaagctgacagtggacaagagcagatggcagcagggcaacgtgttcagctgcagcgtgctgcatgaagccctgcacagccactacacccagaagtccctgtctctgagccccggcaagtgataa

SEQ ID NO: 203 - RNA, 1458 nt, synthetic construct
  source 1..1458: mol_type = other RNA
atggattggatttggagaatcctgttcctcgtgggcgccgctaccggagcccactcccagggcagactgtttcagtctggcgccgaagtgaaaagaccaggcgcctctgtgcggatcagctgcagagctgacgacgacccctacaccgacgacgataccttcaccaagtactggacccactggatcagacaggcccctggacaaagacctgagtggctgggagtgatcagccctcacttcgccagacctatctacagctacaagttccgggacagactgaccctgaccagagacagctctctgaccgccgtgtacctggaactgaagggcctgcagcctgacgacagcggcatctacttttgcgccagagatcccttcggcgacagagcccctcactacaactaccacatggacgtgtggggcggaggcacagccgtgatagttagcagcgcatctgtggccgctcctagcgtgttcatcttcccacctagcgacgaggaactgaagtctggcacagccagcgtcgtgtgcctgctgaacaacttctaccccagagaagccaaggtgcagtggaaggtggacaacgccctgcagagcggcaatagccaagagagcgtgaccgagcaggacagcaaggactctacctacagcctgagcagcaccctgacactgagcaaggccgactacgagaagcacaaagtgtacgcctgcgaagtgacccaccagggcctttctagccctgtgaccaagagcttcaaccggggcgagtgcgataagacccacacctgtcctccatgtccagctccagaactgctgggcggaccttccgtgttcctgtttcctccaaagcctaaggacaccctgatgatcagcagaacccctgaagtgacctgcgtggtggtggatgtgtctcacgaggaccctgaagtgaagttcaattggtacgtggacggcgtggaagtgcacaacgccaagaccaagcctagagaggaacagtacaacagcacctacagagtggtgtccgtgctgaccgtgctgcaccaggattggctgaacggcaaagagtacaagtgcaaggtgtccaacaaggccctgcctgcccctgaggaaaagaccatcagcaaggccaagggccagcctcgcgaacctcaagtctgtacactgcctcctagccgcgacgaactgaccaagaaccaggtgtccctgagctgcgccgtgaagggcttttacccttccgatatcgccgtggaatgggagagcaatggccagcctgagaacaactacaagacaacccctcctgtgctggacagcgacggctcattcttcctggtgtccaagctgacagtggacaagagcagatggcagcagggcaacgtgttcagctgcagcgtgctgcatgaagccctgcacagccactacacccagaagtccctgtctctgagccccggcaagtgataa

SEQ ID NO: 204 - RNA, 1458 nt, synthetic construct
  source 1..1458: mol_type = other RNA
atggattggatttggagaatcctgttcctcgtgggcgccgctaccggagcccactcccagggcagactgtttcagtctggcgccgaagtgaaaagaccaggcgcctctgtgcggatcagctgcagagctgacgacgacccctacaccgacgacgataccttcaccaagtactggacccactggatcagacaggcccctggacaaagacctgagtggctgggagtgatcagccctcacttcgccagacctatctacagctacaagttccgggacagactgaccctgaccagagacagctctctgaccgccgtgtacctggaactgaagggcctgcagcctgacgacagcggcatctacttttgcgccagagatcccttcggcgacagagcccctcactacaactaccacatggacgtgtggggcggaggcacagccgtgatagttagcagcgcatctgtggccgctcctagcgtgttcatcttcccacctagcgacgaggaactgaagtctggcacagccagcgtcgtgtgcctgctgaacaacttctaccccagagaagccaaggtgcagtggaaggtggacaacgccctgcagagcggcaatagccaagagagcgtgaccgagcaggacagcaaggactctacctacagcctgagcagcaccctgacactgagcaaggccgactacgagaagcacaaagtgtacgcctgcgaagtgacccaccagggcctttctagccctgtgaccaagagcttcaaccggggcgagtgcgataagacccacacctgtcctccatgtccagctccagaactgctcggcggaccttccgtgttcctgtttcctccaaagcctaaggacaccctgatgatcagcagaacccctgaagtgacctgcgtggtggtggatgtgtctcacgaggacccagaagtgaagttcaattggtacgtggacggcgtggaagtgcacaacgccaagaccaagcctagagaggaacagtacaacagcacctacagagtggtgtccgtgctgacagtgctgcaccaggattggctgaacggcaaagagtacaagtgcaaggtgtccaacaaggccctgcctgctcctatcgagaaaaccatcagcaaggccaagggccagcctagggaaccccaggtttacaccctgcctccatgccgcgacgaactgaccaagaaccaggtgtccctgtggtgcctggtcaagggcttctacccttccgatatcgccgtggaatgggagagcaatggccagcctgagaacaactacaagacaacccctcctgtgctggacagcgacggctcattcttcctgtacagcaagctgacagtggacaagagcagatggcagcagggcaacgtgttcagctgcagcgtgctgcatgaagccctgcacagccactacacccagaagtccctgtctctgagccccggcaagtgataa

SEQ ID NO: 205 - RNA, 1458 nt, synthetic construct
  source 1..1458: mol_type = other RNA
atggattggatttggagaatcctgttcctcgtgggcgccgctaccggagcccactcccagggcagactgtttcagtctggcgccgaagtgaaaagaccaggcgcctctgtgcggatcagctgcagagctgacgacgacccctacaccgacgacgataccttcaccaagtactggacccactggatcagacaggcccctggacaaagacctgagtggctgggagtgatcagccctcacttcgccagacctatctacagctacaagttccgggacagactgaccctgaccagagacagctctctgaccgccgtgtacctggaactgaagggcctgcagcctgacgacagcggcatctacttttgcgccagagatcccttcggcgacagagcccctcactacaactaccacatggacgtgtggggcggaggcacagccgtgatagttagcagcgcatctgtggccgctcctagcgtgttcatcttcccacctagcgacgaggaactgaagtctggcacagccagcgtcgtgtgcctgctgaacaacttctaccccagagaagccaaggtgcagtggaaggtggacaacgccctgcagagcggcaatagccaagagagcgtgaccgagcaggacagcaaggactctacctacagcctgagcagcaccctgacactgagcaaggccgactacgagaagcacaaagtgtacgcctgcgaagtgacccaccagggcctttctagccctgtgaccaagagcttcaaccggggcgagtgcgataagacccacacctgtcctccatgtccagctccagaactgctggccggaccttccgtgttcctgtttcctccaaagcctaaggacaccctgatgatcagcagaacccctgaagtgacctgcgtggtggtggatgtgtctcacgaggaccctgaagtgaagttcaattggtacgtggacggcgtggaagtgcacaacgccaagaccaagcctagagaggaacagtacaacagcacctacagagtggtgtccgtgctgaccgtgctgcaccaggattggctgaacggcaaagagtacaagtgcaaggtgtccaacaaggccctgcctctgcctgaggaaaagaccatcagcaaggccaagggccagcctagggaaccccaggtttacaccctgcctccatgccgcgacgaactgaccaagaaccaggtgtccctgtggtgcctggtcaagggcttctacccttccgatatcgccgtggaatgggagagcaatggccagcctgagaacaactacaagacaacccctcctgtgctggacagcgacggctcattcttcctgtacagcaagctgacagtggacaagagcagatggcagcagggcaacgtgttcagctgcagcgtgctgcatgaagccctgcacagccactacacccagaagtccctgtctctgagccccggcaagtgataa

SEQ ID NO: 206 - RNA, 1458 nt, synthetic construct
  source 1..1458: mol_type = other RNA
atggattggatttggagaatcctgttcctcgtgggcgccgctaccggagcccactcccagggcagactgtttcagtctggcgccgaagtgaaaagaccaggcgcctctgtgcggatcagctgcagagctgacgacgacccctacaccgacgacgataccttcaccaagtactggacccactggatcagacaggcccctggacaaagacctgagtggctgggagtgatcagccctcacttcgccagacctatctacagctacaagttccgggacagactgaccctgaccagagacagctctctgaccgccgtgtacctggaactgaagggcctgcagcctgacgacagcggcatctacttttgcgccagagatcccttcggcgacagagcccctcactacaactaccacatggacgtgtggggcggaggcacagccgtgatagttagcagcgcatctgtggccgctcctagcgtgttcatcttcccacctagcgacgaggaactgaagtctggcacagccagcgtcgtgtgcctgctgaacaacttctaccccagagaagccaaggtgcagtggaaggtggacaacgccctgcagagcggcaatagccaagagagcgtgaccgagcaggacagcaaggactctacctacagcctgagcagcaccctgacactgagcaaggccgactacgagaagcacaaagtgtacgcctgcgaagtgacccaccagggcctttctagccctgtgaccaagagcttcaaccggggcgagtgcgataagacccacacctgtcctccatgtccagctccagaactgctggccggaccttccgtgttcctgtttcctccaaagcctaaggacaccctgatgatcagcagaacccctgaagtgacctgcgtggtggtggatgtgtctcacgaggaccctgaagtgaagttcaattggtacgtggacggcgtggaagtgcacaacgccaagaccaagcctagagaggaacagtacaacagcacctacagagtggtgtccgtgctgaccgtgctgcaccaggattggctgaacggcaaagagtacaagtgcaaggtgtccaacaaggccctgcctgcccctgaggaaaagaccatcagcaaggccaagggccagcctagggaaccccaggtttacaccctgcctccatgccgcgacgaactgaccaagaaccaggtgtccctgtggtgcctggtcaagggcttctacccttccgatatcgccgtggaatgggagagcaatggccagcctgagaacaactacaagacaacccctcctgtgctggacagcgacggctcattcttcctgtacagcaagctgacagtggacaagagcagatggcagcagggcaacgtgttcagctgcagcgtgctgcatgaagccctgcacagccactacacccagaagtccctgtctctgagccccggcaagtgataa

SEQ ID NO: 207 - RNA, 1458 nt, synthetic construct
  source 1..1458: mol_type = other RNA
atggattggatttggagaatcctgttcctcgtgggcgccgctaccggagcccactcccagggcagactgtttcagtctggcgccgaagtgaaaagaccaggcgcctctgtgcggatcagctgcagagctgacgacgacccctacaccgacgacgataccttcaccaagtactggacccactggatcagacaggcccctggacaaagacctgagtggctgggagtgatcagccctcacttcgccagacctatctacagctacaagttccgggacagactgaccctgaccagagacagctctctgaccgccgtgtacctggaactgaagggcctgcagcctgacgacagcggcatctacttttgcgccagagatcccttcggcgacagagcccctcactacaactaccacatggacgtgtggggcggaggcacagccgtgatagttagcagcgcatctgtggccgctcctagcgtgttcatcttcccacctagcgacgaggaactgaagtctggcacagccagcgtcgtgtgcctgctgaacaacttctaccccagagaagccaaggtgcagtggaaggtggacaacgccctgcagagcggcaatagccaagagagcgtgaccgagcaggacagcaaggactctacctacagcctgagcagcaccctgacactgagcaaggccgactacgagaagcacaaagtgtacgcctgcgaagtgacccaccagggcctttctagccctgtgaccaagagcttcaaccggggcgagtgcgataagacccacacctgtcctccatgtccagctccagaactgctggccggaccttccgtgttcctgtttcctccaaagcctaaggacaccctgatgatcagcagaacccctgaagtgacctgcgtggtggtggatgtgtctcacgaggaccctgaagtgaagttcaattggtacgtggacggcgtggaagtgcacaacgccaagaccaagcctagagaggaacagtacaacagcacctacagagtggtgtccgtgctgaccgtgctgcaccaggattggctgaacggcaaagagtacaagtgcaaggtgtccaacaaggccctgcctgcccctatcgaaaagaccatcagcaaggccaagggccagcctagggaaccccaggtttacaccctgcctccatgccgcgacgaactgaccaagaaccaggtgtccctgtggtgcctggtcaagggcttctacccttccgatatcgccgtggaatgggagagcaatggccagcctgagaacaactacaagacaacccctcctgtgctggacagcgacggctcattcttcctgtacagcaagctgacagtggacaagagcagatggcagcagggcaacgtgttcagctgcagcgtgctgcatgaagccctgcacagccactacacccagaagtccctgtctctgagccccggcaagtgataa

SEQ ID NO: 208 - RNA, 1458 nt, synthetic construct
  source 1..1458: mol_type = other RNA
atggattggatttggagaatcctgttcctcgtgggcgccgctaccggagcccactcccagggcagactgtttcagtctggcgccgaagtgaaaagaccaggcgcctctgtgcggatcagctgcagagctgacgacgacccctacaccgacgacgataccttcaccaagtactggacccactggatcagacaggcccctggacaaagacctgagtggctgggagtgatcagccctcacttcgccagacctatctacagctacaagttccgggacagactgaccctgaccagagacagctctctgaccgccgtgtacctggaactgaagggcctgcagcctgacgacagcggcatctacttttgcgccagagatcccttcggcgacagagcccctcactacaactaccacatggacgtgtggggcggaggcacagccgtgatagttagcagcgcatctgtggccgctcctagcgtgttcatcttcccacctagcgacgaggaactgaagtctggcacagccagcgtcgtgtgcctgctgaacaacttctaccccagagaagccaaggtgcagtggaaggtggacaacgccctgcagagcggcaatagccaagagagcgtgaccgagcaggacagcaaggactctacctacagcctgagcagcaccctgacactgagcaaggccgactacgagaagcacaaagtgtacgcctgcgaagtgacccaccagggcctttctagccctgtgaccaagagcttcaaccggggcgagtgcgataagacccacacctgtcctccatgtccagctccagaactgctgggcggaccttccgtgttcctgtttcctccaaagcctaaggacaccctgatgatcagcagaacccctgaagtgacctgcgtggtggtggatgtgtctcacgaggaccctgaagtgaagttcaattggtacgtggacggcgtggaagtgcacaacgccaagaccaagcctagagaggaacagtacaacagcacctacagagtggtgtccgtgctgaccgtgctgcaccaggattggctgaacggcaaagagtacaagtgcaaggtgtccaacaaggccctgcctgcccctgaggaaaagaccatcagcaaggccaagggccagcctagggaaccccaggtttacaccctgcctccatgccgcgacgaactgaccaagaaccaggtgtccctgtggtgcctggtcaagggcttctacccttccgatatcgccgtggaatgggagagcaatggccagcctgagaacaactacaagacaacccctcctgtgctggacagcgacggctcattcttcctgtacagcaagctgacagtggacaagagcagatggcagcagggcaacgtgttcagctgcagcgtgctgcatgaagccctgcacagccactacacccagaagtccctgtctctgagccccggcaagtgataa

SEQ ID NO: 209 - RNA, 1446 nt, synthetic construct
  source 1..1446: mol_type = other RNA
atggattggatttggagaatcctgttcctcgtgggcgccgctaccggagcccactcccagggcagactgtttcagtctggcgccgaagtgaaaagaccaggcgcctctgtgcggatcagctgcagagctgacgacgacccctacaccgacgacgataccttcaccaagtactggacccactggatcagacaggcccctggacaaagacctgagtggctgggagtgatcagccctcacttcgccagacctatctacagctacaagttccgggacagactgaccctgaccagagacagctctctgaccgccgtgtacctggaactgaagggcctgcagcctgacgacagcggcatctacttttgcgccagagatcccttcggcgacagagcccctcactacaactaccacatggacgtgtggggcggaggcacagccgtgatagttagcagcgcttccacaaagggccctagcgtgttccctctggctcctagcagcaagtctacaagcggaggaacagctgccctgggctgcctggtggaagattactttcctgagcctgtgaccgtgtcctggaacagcggtgctctgacttctggcgtgcacacctttccagccgtgctgcaaagcagcggcctgtactctctgagcagcgtggtcacagtgccaagctctagcctgggcacccagacctacatctgcaatgtgaaccacaagcctagcaacaccaaggtggacgacagagtggaacccaagagctgcgacaagacccacacctgtcctccatgtcctgctccagaactgctcggcggaccttccgtgttcctgtttcctccaaagcctaaggacaccctgatgatcagcagaacccctgaagtgacctgcgtggtggtggatgtgtctcacgaggacccagaagtgaagttcaattggtacgtggacggcgtggaagtgcacaacgccaagaccaagcctagagaggaacagtacaacagcacctacagagtggtgtccgtgctgacagtgctgcaccaggattggctgaacggcaaagagtacaagtgcaaggtgtccaacaaggccctgcctgctcctatcgagaaaaccatcagcaaggccaagggccagcctagggaaccccaggtttacacactgcctccaagccgcgaggaaatgaccaagaaccaggtgtccctgacctgcctcgtgaagggcttctacccttccgatatcgccgtggaatgggagagcaatggccagcctgagaacaactacaagacaacccctcctgtgctggacagcgacggctcattcttcctgtacagcaagctgactgtggataagtcccggtggcagcagggcaacgtgttcagctgttctgtgatgcacgaagccctgcacaaccactacacccagaaaagcctgtctctgagccccggcaagtgataa

SEQ ID NO: 210 - RNA, 1446 nt, synthetic construct
  source 1..1446: mol_type = other RNA
atggattggatttggagaatcctgttcctcgtgggcgccgctaccggagcccactcccagggcagactgtttcagtctggcgccgaagtgaaaagaccaggcgcctctgtgcggatcagctgcagagctgacgacgacccctacaccgacgacgataccttcaccaagtactggacccactggatcagacaggcccctggacaaagacctgagtggctgggagtgatcagccctcacttcgccagacctatctacagctacaagttccgggacagactgaccctgaccagagacagctctctgaccgccgtgtacctggaactgaagggcctgcagcctgacgacagcggcatctacttttgcgccagagatcccttcggcgacagagcccctcactacaactaccacatggacgtgtggggcggaggcacagccgtgatagttagcagcgcttccacaaagggccctagcgtgttccctctggctcctagcagcaagtctacaagcggaggaacagctgccctgggctgcctggtggaagattactttcctgagcctgtgaccgtgtcctggaacagcggtgctctgacttctggcgtgcacacctttccagccgtgctgcaaagcagcggcctgtactctctgagcagcgtggtcacagtgccaagctctagcctgggcacccagacctacatctgcaatgtgaaccacaagcctagcaacaccaaggtggacgacagagtggaacccaagagctgcgacaagacccacacctgtcctccatgtcctgctccagaactgctcggcggaccttccgtgttcctgtttcctccaaagcctaaggacaccctgatgatcagcagaacccctgaagtgacctgcgtggtggtggatgtgtctcacgaggacccagaagtgaagttcaattggtacgtggacggcgtggaagtgcacaacgccaagaccaagcctagagaggaacagtacaacagcacctacagagtggtgtccgtgctgacagtgctgcaccaggattggctgaacggcaaagagtacaagtgcaaggtgtccaacaaggccctgcctgctcctatcgagaaaaccatcagcaaggccaagggccagcctagggaaccccaggtttacacactgcctccaagccgcgaggaaatgaccaagaaccaggtgtccctgacctgcctcgtgaagggcttctacccttccgatatcgccgtggaatgggagagcaatggccagcctgagaacaactacaagacaacccctcctgtgctggacagcgacggctcattcttcctgtacagcaagctgaccgtggacaagtccagatggcagcagggcaacgtgttcagctgtagcgtgctgcacgaagccctgcacagccactacacccagaaaagcctgtctctgagccccggcaaatgataa

SEQ ID NO: 211 - RNA, 1446 nt, synthetic construct
  source 1..1446: mol_type = other RNA
atggattggatttggagaatcctgttcctcgtgggcgccgctaccggagcccactcccagggcagactgtttcagtctggcgccgaagtgaaaagaccaggcgcctctgtgcggatcagctgcagagctgacgacgacccctacaccgacgacgataccttcaccaagtactggacccactggatcagacaggcccctggacaaagacctgagtggctgggagtgatcagccctcacttcgccagacctatctacagctacaagttccgggacagactgaccctgaccagagacagctctctgaccgccgtgtacctggaactgaagggcctgcagcctgacgacagcggcatctacttttgcgccagagatcccttcggcgacagagcccctcactacaactaccacatggacgtgtggggcggaggcacagccgtgatagttagcagcgcttccacaaagggccctagcgtgttccctctggctcctagcagcaagtctacaagcggaggaacagctgccctgggctgcctggtggaagattactttcctgagcctgtgaccgtgtcctggaacagcggtgctctgacttctggcgtgcacacctttccagccgtgctgcaaagcagcggcctgtactctctgagcagcgtggtcacagtgccaagctctagcctgggcacccagacctacatctgcaatgtgaaccacaagcctagcaacaccaaggtggacgacagagtggaacccaagagctgcgacaagacccacacctgtcctccatgtcctgctccagaactgctggccggaccttccgtgttcctgtttcctccaaagcctaaggacaccctgatgatcagcagaacccctgaagtgacctgcgtggtggtggatgtgtctcacgaggaccctgaagtgaagttcaattggtacgtggacggcgtggaagtgcacaacgccaagaccaagcctagagaggaacagtacaacagcacctacagagtggtgtccgtgctgaccgtgctgcaccaggattggctgaacggcaaagagtacaagtgcaaggtgtccaacaaggccctgcctctgcctgaggaaaagaccatcagcaaggccaagggccagcctagggaaccccaggtttacacactgcctccaagccgcgaggaaatgaccaagaaccaggtgtccctgacctgcctcgtgaagggcttctacccttccgatatcgccgtggaatgggagagcaatggccagcctgagaacaactacaagacaacccctcctgtgctggacagcgacggctcattcttcctgtacagcaagctgaccgtggacaagtccagatggcagcagggcaacgtgttcagctgtagcgtgctgcacgaagccctgcacagccactacacccagaaaagcctgtctctgagccccggcaaatgataa

SEQ ID NO: 212 - RNA, 1446 nt, synthetic construct
  source 1..1446: mol_type = other RNA
atggattggatttggagaatcctgttcctcgtgggcgccgctaccggagcccactcccagggcagactgtttcagtctggcgccgaagtgaaaagaccaggcgcctctgtgcggatcagctgcagagctgacgacgacccctacaccgacgacgataccttcaccaagtactggacccactggatcagacaggcccctggacaaagacctgagtggctgggagtgatcagccctcacttcgccagacctatctacagctacaagttccgggacagactgaccctgaccagagacagctctctgaccgccgtgtacctggaactgaagggcctgcagcctgacgacagcggcatctacttttgcgccagagatcccttcggcgacagagcccctcactacaactaccacatggacgtgtggggcggaggcacagccgtgatagttagcagcgcttccacaaagggccctagcgtgttccctctggctcctagcagcaagtctacaagcggaggaacagctgccctgggctgcctggtggaagattactttcctgagcctgtgaccgtgtcctggaacagcggtgctctgacttctggcgtgcacacctttccagccgtgctgcaaagcagcggcctgtactctctgagcagcgtggtcacagtgccaagctctagcctgggcacccagacctacatctgcaatgtgaaccacaagcctagcaacaccaaggtggacgacagagtggaacccaagagctgcgacaagacccacacctgtcctccatgtcctgctccagaactgctggccggaccttccgtgttcctgtttcctccaaagcctaaggacaccctgatgatcagcagaacccctgaagtgacctgcgtggtggtggatgtgtctcacgaggaccctgaagtgaagttcaattggtacgtggacggcgtggaagtgcacaacgccaagaccaagcctagagaggaacagtacaacagcacctacagagtggtgtccgtgctgaccgtgctgcaccaggattggctgaacggcaaagagtacaagtgcaaggtgtccaacaaggccctgcctgcccctgaggaaaagaccatcagcaaggccaagggccagcctagggaaccccaggtttacacactgcctccaagccgcgaggaaatgaccaagaaccaggtgtccctgacctgcctcgtgaagggcttctacccttccgatatcgccgtggaatgggagagcaatggccagcctgagaacaactacaagacaacccctcctgtgctggacagcgacggctcattcttcctgtacagcaagctgaccgtggacaagtccagatggcagcagggcaacgtgttcagctgtagcgtgctgcacgaagccctgcacagccactacacccagaaaagcctgtctctgagccccggcaaatgataa

SEQ ID NO: 213 - RNA, 1446 nt, synthetic construct
  source 1..1446: mol_type = other RNA
atggattggatttggagaatcctgttcctcgtgggcgccgctaccggagcccactcccagggcagactgtttcagtctggcgccgaagtgaaaagaccaggcgcctctgtgcggatcagctgcagagctgacgacgacccctacaccgacgacgataccttcaccaagtactggacccactggatcagacaggcccctggacaaagacctgagtggctgggagtgatcagccctcacttcgccagacctatctacagctacaagttccgggacagactgaccctgaccagagacagctctctgaccgccgtgtacctggaactgaagggcctgcagcctgacgacagcggcatctacttttgcgccagagatcccttcggcgacagagcccctcactacaactaccacatggacgtgtggggcggaggcacagccgtgatagttagcagcgcttccacaaagggccctagcgtgttccctctggctcctagcagcaagtctacaagcggaggaacagctgccctgggctgcctggtggaagattactttcctgagcctgtgaccgtgtcctggaacagcggtgctctgacttctggcgtgcacacctttccagccgtgctgcaaagcagcggcctgtactctctgagcagcgtggtcacagtgccaagctctagcctgggcacccagacctacatctgcaatgtgaaccacaagcctagcaacaccaaggtggacgacagagtggaacccaagagctgcgacaagacccacacctgtcctccatgtcctgctccagaactgctggccggaccttccgtgttcctgtttcctccaaagcctaaggacaccctgatgatcagcagaacccctgaagtgacctgcgtggtggtggatgtgtctcacgaggaccctgaagtgaagttcaattggtacgtggacggcgtggaagtgcacaacgccaagaccaagcctagagaggaacagtacaacagcacctacagagtggtgtccgtgctgaccgtgctgcaccaggattggctgaacggcaaagagtacaagtgcaaggtgtccaacaaggccctgcctgcccctatcgaaaagaccatcagcaaggccaagggccagcctagggaaccccaggtttacacactgcctccaagccgcgaggaaatgaccaagaaccaggtgtccctgacctgcctcgtgaagggcttctacccttccgatatcgccgtggaatgggagagcaatggccagcctgagaacaactacaagacaacccctcctgtgctggacagcgacggctcattcttcctgtacagcaagctgaccgtggacaagtccagatggcagcagggcaacgtgttcagctgtagcgtgctgcacgaagccctgcacagccactacacccagaaaagcctgtctctgagccccggcaaatgataa

SEQ ID NO: 214 - RNA, 1446 nt, synthetic construct
  source 1..1446: mol_type = other RNA
atggattggatttggagaatcctgttcctcgtgggcgccgctaccggagcccactcccagggcagactgtttcagtctggcgccgaagtgaaaagaccaggcgcctctgtgcggatcagctgcagagctgacgacgacccctacaccgacgacgataccttcaccaagtactggacccactggatcagacaggcccctggacaaagacctgagtggctgggagtgatcagccctcacttcgccagacctatctacagctacaagttccgggacagactgaccctgaccagagacagctctctgaccgccgtgtacctggaactgaagggcctgcagcctgacgacagcggcatctacttttgcgccagagatcccttcggcgacagagcccctcactacaactaccacatggacgtgtggggcggaggcacagccgtgatagttagcagcgcttccacaaagggccctagcgtgttccctctggctcctagcagcaagtctacaagcggaggaacagctgccctgggctgcctggtggaagattactttcctgagcctgtgaccgtgtcctggaacagcggtgctctgacttctggcgtgcacacctttccagccgtgctgcaaagcagcggcctgtactctctgagcagcgtggtcacagtgccaagctctagcctgggcacccagacctacatctgcaatgtgaaccacaagcctagcaacaccaaggtggacgacagagtggaacccaagagctgcgacaagacccacacctgtcctccatgtcctgctccagaactgctgggcggaccttccgtgttcctgtttcctccaaagcctaaggacaccctgatgatcagcagaacccctgaagtgacctgcgtggtggtggatgtgtctcacgaggaccctgaagtgaagttcaattggtacgtggacggcgtggaagtgcacaacgccaagaccaagcctagagaggaacagtacaacagcacctacagagtggtgtccgtgctgaccgtgctgcaccaggattggctgaacggcaaagagtacaagtgcaaggtgtccaacaaggccctgcctgcccctgaggaaaagaccatcagcaaggccaagggccagcctagggaaccccaggtttacacactgcctccaagccgcgaggaaatgaccaagaaccaggtgtccctgacctgcctcgtgaagggcttctacccttccgatatcgccgtggaatgggagagcaatggccagcctgagaacaactacaagacaacccctcctgtgctggacagcgacggctcattcttcctgtacagcaagctgaccgtggacaagtccagatggcagcagggcaacgtgttcagctgtagcgtgctgcacgaagccctgcacagccactacacccagaaaagcctgtctctgagccccggcaaatgataa

SEQ ID NO: 215 - RNA, 1446 nt, synthetic construct
  source 1..1446: mol_type = other RNA
atggattggatttggagaatcctgttcctcgtgggcgccgctaccggagcccactcccagggcagactgtttcagtctggcgccgaagtgaaaagaccaggcgcctctgtgcggatcagctgcagagctgacgacgacccctacaccgacgacgataccttcaccaagtactggacccactggatcagacaggcccctggacaaagacctgagtggctgggagtgatcagccctcacttcgccagacctatctacagctacaagttccgggacagactgaccctgaccagagacagctctctgaccgccgtgtacctggaactgaagggcctgcagcctgacgacagcggcatctacttttgcgccagagatcccttcggcgacagagcccctcactacaactaccacatggacgtgtggggcggaggcacagccgtgatagttagcagcgcttccacaaagggccctagcgtgttccctctggctcctagcagcaagtctacaagcggaggaacagctgccctgggctgcctggtggaagattactttcctgagcctgtgaccgtgtcctggaacagcggtgctctgacttctggcgtgcacacctttccagccgtgctgcaaagcagcggcctgtactctctgagcagcgtggtcacagtgccaagctctagcctgggcacccagacctacatctgcaatgtgaaccacaagcctagcaacaccaaggtggacgacagagtggaacccaagagctgcgacaagacccacacctgtcctccatgtcctgctccagaactgctcggcggaccttccgtgttcctgtttcctccaaagcctaaggacaccctgatgatcagcagaacccctgaagtgacctgcgtggtggtggatgtgtctcacgaggacccagaagtgaagttcaattggtacgtggacggcgtggaagtgcacaacgccaagaccaagcctagagaggaacagtacaacagcacctacagagtggtgtccgtgctgacagtgctgcaccaggattggctgaacggcaaagagtacaagtgcaaggtgtccaacaaggccctgcctgctcctatcgagaaaaccatcagcaaggccaagggccagcctcgcgaacctcaagtctgtacactgcctcctagccgcgaggaaatgaccaagaaccaggtgtccctgagctgcgccgtgaagggcttttacccttccgatatcgccgtggaatgggagagcaatggccagcctgagaacaactacaagacaacccctcctgtgctggacagcgacggctcattcttcctggtgtccaagctgacagtggacaagagcagatggcagcagggcaacgtgttcagctgcagcgtgctgcatgaagccctgcacagccactacacccagaagtccctgtctctgagccccggcaagtgataa

SEQ ID NO: 216 - RNA, 1446 nt, synthetic construct
  source 1..1446: mol_type = other RNA
atggattggatttggagaatcctgttcctcgtgggcgccgctaccggagcccactcccagggcagactgtttcagtctggcgccgaagtgaaaagaccaggcgcctctgtgcggatcagctgcagagctgacgacgacccctacaccgacgacgataccttcaccaagtactggacccactggatcagacaggcccctggacaaagacctgagtggctgggagtgatcagccctcacttcgccagacctatctacagctacaagttccgggacagactgaccctgaccagagacagctctctgaccgccgtgtacctggaactgaagggcctgcagcctgacgacagcggcatctacttttgcgccagagatcccttcggcgacagagcccctcactacaactaccacatggacgtgtggggcggaggcacagccgtgatagttagcagcgcttccacaaagggccctagcgtgttccctctggctcctagcagcaagtctacaagcggaggaacagctgccctgggctgcctggtggaagattactttcctgagcctgtgaccgtgtcctggaacagcggtgctctgacttctggcgtgcacacctttccagccgtgctgcaaagcagcggcctgtactctctgagcagcgtggtcacagtgccaagctctagcctgggcacccagacctacatctgcaatgtgaaccacaagcctagcaacaccaaggtggacgacagagtggaacccaagagctgcgacaagacccacacctgtcctccatgtcctgctccagaactgctggccggaccttccgtgttcctgtttcctccaaagcctaaggacaccctgatgatcagcagaacccctgaagtgacctgcgtggtggtggatgtgtctcacgaggaccctgaagtgaagttcaattggtacgtggacggcgtggaagtgcacaacgccaagaccaagcctagagaggaacagtacaacagcacctacagagtggtgtccgtgctgaccgtgctgcaccaggattggctgaacggcaaagagtacaagtgcaaggtgtccaacaaggccctgcctctgcctgaggaaaagaccatcagcaaggccaagggccagcctcgcgaacctcaagtctgtacactgcctcctagccgcgaggaaatgaccaagaaccaggtgtccctgagctgcgccgtgaagggcttttacccttccgatatcgccgtggaatgggagagcaatggccagcctgagaacaactacaagacaacccctcctgtgctggacagcgacggctcattcttcctggtgtccaagctgacagtggacaagagcagatggcagcagggcaacgtgttcagctgcagcgtgctgcatgaagccctgcacagccactacacccagaagtccctgtctctgagccccggcaagtgataa

SEQ ID NO: 217 - RNA, 1446 nt, synthetic construct
  source 1..1446: mol_type = other RNA
atggattggatttggagaatcctgttcctcgtgggcgccgctaccggagcccactcccagggcagactgtttcagtctggcgccgaagtgaaaagaccaggcgcctctgtgcggatcagctgcagagctgacgacgacccctacaccgacgacgataccttcaccaagtactggacccactggatcagacaggcccctggacaaagacctgagtggctgggagtgatcagccctcacttcgccagacctatctacagctacaagttccgggacagactgaccctgaccagagacagctctctgaccgccgtgtacctggaactgaagggcctgcagcctgacgacagcggcatctacttttgcgccagagatcccttcggcgacagagcccctcactacaactaccacatggacgtgtggggcggaggcacagccgtgatagttagcagcgcttccacaaagggccctagcgtgttccctctggctcctagcagcaagtctacaagcggaggaacagctgccctgggctgcctggtggaagattactttcctgagcctgtgaccgtgtcctggaacagcggtgctctgacttctggcgtgcacacctttccagccgtgctgcaaagcagcggcctgtactctctgagcagcgtggtcacagtgccaagctctagcctgggcacccagacctacatctgcaatgtgaaccacaagcctagcaacaccaaggtggacgacagagtggaacccaagagctgcgacaagacccacacctgtcctccatgtcctgctccagaactgctggccggaccttccgtgttcctgtttcctccaaagcctaaggacaccctgatgatcagcagaacccctgaagtgacctgcgtggtggtggatgtgtctcacgaggaccctgaagtgaagttcaattggtacgtggacggcgtggaagtgcacaacgccaagaccaagcctagagaggaacagtacaacagcacctacagagtggtgtccgtgctgaccgtgctgcaccaggattggctgaacggcaaagagtacaagtgcaaggtgtccaacaaggccctgcctgcccctgaggaaaagaccatcagcaaggccaagggccagcctcgcgaacctcaagtctgtacactgcctcctagccgcgaggaaatgaccaagaaccaggtgtccctgagctgcgccgtgaagggcttttacccttccgatatcgccgtggaatgggagagcaatggccagcctgagaacaactacaagacaacccctcctgtgctggacagcgacggctcattcttcctggtgtccaagctgacagtggacaagagcagatggcagcagggcaacgtgttcagctgcagcgtgctgcatgaagccctgcacagccactacacccagaagtccctgtctctgagccccggcaagtgataa

SEQ ID NO: 218 - RNA, 1446 nt, synthetic construct
  source 1..1446: mol_type = other RNA
atggattggatttggagaatcctgttcctcgtgggcgccgctaccggagcccactcccagggcagactgtttcagtctggcgccgaagtgaaaagaccaggcgcctctgtgcggatcagctgcagagctgacgacgacccctacaccgacgacgataccttcaccaagtactggacccactggatcagacaggcccctggacaaagacctgagtggctgggagtgatcagccctcacttcgccagacctatctacagctacaagttccgggacagactgaccctgaccagagacagctctctgaccgccgtgtacctggaactgaagggcctgcagcctgacgacagcggcatctacttttgcgccagagatcccttcggcgacagagcccctcactacaactaccacatggacgtgtggggcggaggcacagccgtgatagttagcagcgcttccacaaagggccctagcgtgttccctctggctcctagcagcaagtctacaagcggaggaacagctgccctgggctgcctggtggaagattactttcctgagcctgtgaccgtgtcctggaacagcggtgctctgacttctggcgtgcacacctttccagccgtgctgcaaagcagcggcctgtactctctgagcagcgtggtcacagtgccaagctctagcctgggcacccagacctacatctgcaatgtgaaccacaagcctagcaacaccaaggtggacgacagagtggaacccaagagctgcgacaagacccacacctgtcctccatgtcctgctccagaactgctggccggaccttccgtgttcctgtttcctccaaagcctaaggacaccctgatgatcagcagaacccctgaagtgacctgcgtggtggtggatgtgtctcacgaggaccctgaagtgaagttcaattggtacgtggacggcgtggaagtgcacaacgccaagaccaagcctagagaggaacagtacaacagcacctacagagtggtgtccgtgctgaccgtgctgcaccaggattggctgaacggcaaagagtacaagtgcaaggtgtccaacaaggccctgcctgcccctatcgaaaagaccatcagcaaggccaagggccagcctcgcgaacctcaagtctgtacactgcctcctagccgcgaggaaatgaccaagaaccaggtgtccctgagctgcgccgtgaagggcttttacccttccgatatcgccgtggaatgggagagcaatggccagcctgagaacaactacaagacaacccctcctgtgctggacagcgacggctcattcttcctggtgtccaagctgacagtggacaagagcagatggcagcagggcaacgtgttcagctgcagcgtgctgcatgaagccctgcacagccactacacccagaagtccctgtctctgagccccggcaagtgataa

SEQ ID NO: 219 - RNA, 1446 nt, synthetic construct
  source 1..1446: mol_type = other RNA
atggattggatttggagaatcctgttcctcgtgggcgccgctaccggagcccactcccagggcagactgtttcagtctggcgccgaagtgaaaagaccaggcgcctctgtgcggatcagctgcagagctgacgacgacccctacaccgacgacgataccttcaccaagtactggacccactggatcagacaggcccctggacaaagacctgagtggctgggagtgatcagccctcacttcgccagacctatctacagctacaagttccgggacagactgaccctgaccagagacagctctctgaccgccgtgtacctggaactgaagggcctgcagcctgacgacagcggcatctacttttgcgccagagatcccttcggcgacagagcccctcactacaactaccacatggacgtgtggggcggaggcacagccgtgatagttagcagcgcttccacaaagggccctagcgtgttccctctggctcctagcagcaagtctacaagcggaggaacagctgccctgggctgcctggtggaagattactttcctgagcctgtgaccgtgtcctggaacagcggtgctctgacttctggcgtgcacacctttccagccgtgctgcaaagcagcggcctgtactctctgagcagcgtggtcacagtgccaagctctagcctgggcacccagacctacatctgcaatgtgaaccacaagcctagcaacaccaaggtggacgacagagtggaacccaagagctgcgacaagacccacacctgtcctccatgtcctgctccagaactgctgggcggaccttccgtgttcctgtttcctccaaagcctaaggacaccctgatgatcagcagaacccctgaagtgacctgcgtggtggtggatgtgtctcacgaggaccctgaagtgaagttcaattggtacgtggacggcgtggaagtgcacaacgccaagaccaagcctagagaggaacagtacaacagcacctacagagtggtgtccgtgctgaccgtgctgcaccaggattggctgaacggcaaagagtacaagtgcaaggtgtccaacaaggccctgcctgcccctgaggaaaagaccatcagcaaggccaagggccagcctcgcgaacctcaagtctgtacactgcctcctagccgcgaggaaatgaccaagaaccaggtgtccctgagctgcgccgtgaagggcttttacccttccgatatcgccgtggaatgggagagcaatggccagcctgagaacaactacaagacaacccctcctgtgctggacagcgacggctcattcttcctggtgtccaagctgacagtggacaagagcagatggcagcagggcaacgtgttcagctgcagcgtgctgcatgaagccctgcacagccactacacccagaagtccctgtctctgagccccggcaagtgataa

SEQ ID NO: 220 - RNA, 1446 nt, synthetic construct
  source 1..1446: mol_type = other RNA
atggattggatttggagaatcctgttcctcgtgggcgccgctaccggagcccactcccagggcagactgtttcagtctggcgccgaagtgaaaagaccaggcgcctctgtgcggatcagctgcagagctgacgacgacccctacaccgacgacgataccttcaccaagtactggacccactggatcagacaggcccctggacaaagacctgagtggctgggagtgatcagccctcacttcgccagacctatctacagctacaagttccgggacagactgaccctgaccagagacagctctctgaccgccgtgtacctggaactgaagggcctgcagcctgacgacagcggcatctacttttgcgccagagatcccttcggcgacagagcccctcactacaactaccacatggacgtgtggggcggaggcacagccgtgatagttagcagcgcttccacaaagggccctagcgtgttccctctggctcctagcagcaagtctacaagcggaggaacagctgccctgggctgcctggtggaagattactttcctgagcctgtgaccgtgtcctggaacagcggtgctctgacttctggcgtgcacacctttccagccgtgctgcaaagcagcggcctgtactctctgagcagcgtggtcacagtgccaagctctagcctgggcacccagacctacatctgcaatgtgaaccacaagcctagcaacaccaaggtggacgacagagtggaacccaagagctgcgacaagacccacacctgtcctccatgtcctgctccagaactgctcggcggaccttccgtgttcctgtttcctccaaagcctaaggacaccctgatgatcagcagaacccctgaagtgacctgcgtggtggtggatgtgtctcacgaggacccagaagtgaagttcaattggtacgtggacggcgtggaagtgcacaacgccaagaccaagcctagagaggaacagtacaacagcacctacagagtggtgtccgtgctgacagtgctgcaccaggattggctgaacggcaaagagtacaagtgcaaggtgtccaacaaggccctgcctgctcctatcgagaaaaccatcagcaaggccaagggccagcctagggaaccccaggtttacaccctgcctccatgccgcgaggaaatgaccaagaaccaggtgtccctgtggtgcctggtcaagggcttctacccttccgatatcgccgtggaatgggagagcaatggccagcctgagaacaactacaagacaacccctcctgtgctggacagcgacggctcattcttcctgtacagcaagctgacagtggacaagagcagatggcagcagggcaacgtgttcagctgcagcgtgctgcatgaagccctgcacagccactacacccagaagtccctgtctctgagccccggcaagtgataa

SEQ ID NO: 221 - RNA, 1446 nt, synthetic construct
  source 1..1446: mol_type = other RNA
atggattggatttggagaatcctgttcctcgtgggcgccgctaccggagcccactcccagggcagactgtttcagtctggcgccgaagtgaaaagaccaggcgcctctgtgcggatcagctgcagagctgacgacgacccctacaccgacgacgataccttcaccaagtactggacccactggatcagacaggcccctggacaaagacctgagtggctgggagtgatcagccctcacttcgccagacctatctacagctacaagttccgggacagactgaccctgaccagagacagctctctgaccgccgtgtacctggaactgaagggcctgcagcctgacgacagcggcatctacttttgcgccagagatcccttcggcgacagagcccctcactacaactaccacatggacgtgtggggcggaggcacagccgtgatagttagcagcgcttccacaaagggccctagcgtgttccctctggctcctagcagcaagtctacaagcggaggaacagctgccctgggctgcctggtggaagattactttcctgagcctgtgaccgtgtcctggaacagcggtgctctgacttctggcgtgcacacctttccagccgtgctgcaaagcagcggcctgtactctctgagcagcgtggtcacagtgccaagctctagcctgggcacccagacctacatctgcaatgtgaaccacaagcctagcaacaccaaggtggacgacagagtggaacccaagagctgcgacaagacccacacctgtcctccatgtcctgctccagaactgctggccggaccttccgtgttcctgtttcctccaaagcctaaggacaccctgatgatcagcagaacccctgaagtgacctgcgtggtggtggatgtgtctcacgaggaccctgaagtgaagttcaattggtacgtggacggcgtggaagtgcacaacgccaagaccaagcctagagaggaacagtacaacagcacctacagagtggtgtccgtgctgaccgtgctgcaccaggattggctgaacggcaaagagtacaagtgcaaggtgtccaacaaggccctgcctctgcctgaggaaaagaccatcagcaaggccaagggccagcctagggaaccccaggtttacaccctgcctccatgccgcgaggaaatgaccaagaaccaggtgtccctgtggtgcctggtcaagggcttctacccttccgatatcgccgtggaatgggagagcaatggccagcctgagaacaactacaagacaacccctcctgtgctggacagcgacggctcattcttcctgtacagcaagctgacagtggacaagagcagatggcagcagggcaacgtgttcagctgcagcgtgctgcatgaagccctgcacagccactacacccagaagtccctgtctctgagccccggcaagtgataa

SEQ ID NO: 222 - RNA, 1446 nt, synthetic construct
  source 1..1446: mol_type = other RNA
atggattggatttggagaatcctgttcctcgtgggcgccgctaccggagcccactcccagggcagactgtttcagtctggcgccgaagtgaaaagaccaggcgcctctgtgcggatcagctgcagagctgacgacgacccctacaccgacgacgataccttcaccaagtactggacccactggatcagacaggcccctggacaaagacctgagtggctgggagtgatcagccctcacttcgccagacctatctacagctacaagttccgggacagactgaccctgaccagagacagctctctgaccgccgtgtacctggaactgaagggcctgcagcctgacgacagcggcatctacttttgcgccagagatcccttcggcgacagagcccctcactacaactaccacatggacgtgtggggcggaggcacagccgtgatagttagcagcgcttccacaaagggccctagcgtgttccctctggctcctagcagcaagtctacaagcggaggaacagctgccctgggctgcctggtggaagattactttcctgagcctgtgaccgtgtcctggaacagcggtgctctgacttctggcgtgcacacctttccagccgtgctgcaaagcagcggcctgtactctctgagcagcgtggtcacagtgccaagctctagcctgggcacccagacctacatctgcaatgtgaaccacaagcctagcaacaccaaggtggacgacagagtggaacccaagagctgcgacaagacccacacctgtcctccatgtcctgctccagaactgctggccggaccttccgtgttcctgtttcctccaaagcctaaggacaccctgatgatcagcagaacccctgaagtgacctgcgtggtggtggatgtgtctcacgaggaccctgaagtgaagttcaattggtacgtggacggcgtggaagtgcacaacgccaagaccaagcctagagaggaacagtacaacagcacctacagagtggtgtccgtgctgaccgtgctgcaccaggattggctgaacggcaaagagtacaagtgcaaggtgtccaacaaggccctgcctgcccctgaggaaaagaccatcagcaaggccaagggccagcctagggaaccccaggtttacaccctgcctccatgccgcgaggaaatgaccaagaaccaggtgtccctgtggtgcctggtcaagggcttctacccttccgatatcgccgtggaatgggagagcaatggccagcctgagaacaactacaagacaacccctcctgtgctggacagcgacggctcattcttcctgtacagcaagctgacagtggacaagagcagatggcagcagggcaacgtgttcagctgcagcgtgctgcatgaagccctgcacagccactacacccagaagtccctgtctctgagccccggcaagtgataa

SEQ ID NO: 223 - RNA, 1446 nt, synthetic construct
  source 1..1446: mol_type = other RNA
atggattggatttggagaatcctgttcctcgtgggcgccgctaccggagcccactcccagggcagactgtttcagtctggcgccgaagtgaaaagaccaggcgcctctgtgcggatcagctgcagagctgacgacgacccctacaccgacgacgataccttcaccaagtactggacccactggatcagacaggcccctggacaaagacctgagtggctgggagtgatcagccctcacttcgccagacctatctacagctacaagttccgggacagactgaccctgaccagagacagctctctgaccgccgtgtacctggaactgaagggcctgcagcctgacgacagcggcatctacttttgcgccagagatcccttcggcgacagagcccctcactacaactaccacatggacgtgtggggcggaggcacagccgtgatagttagcagcgcttccacaaagggccctagcgtgttccctctggctcctagcagcaagtctacaagcggaggaacagctgccctgggctgcctggtggaagattactttcctgagcctgtgaccgtgtcctggaacagcggtgctctgacttctggcgtgcacacctttccagccgtgctgcaaagcagcggcctgtactctctgagcagcgtggtcacagtgccaagctctagcctgggcacccagacctacatctgcaatgtgaaccacaagcctagcaacaccaaggtggacgacagagtggaacccaagagctgcgacaagacccacacctgtcctccatgtcctgctccagaactgctggccggaccttccgtgttcctgtttcctccaaagcctaaggacaccctgatgatcagcagaacccctgaagtgacctgcgtggtggtggatgtgtctcacgaggaccctgaagtgaagttcaattggtacgtggacggcgtggaagtgcacaacgccaagaccaagcctagagaggaacagtacaacagcacctacagagtggtgtccgtgctgaccgtgctgcaccaggattggctgaacggcaaagagtacaagtgcaaggtgtccaacaaggccctgcctgcccctatcgaaaagaccatcagcaaggccaagggccagcctagggaaccccaggtttacaccctgcctccatgccgcgaggaaatgaccaagaaccaggtgtccctgtggtgcctggtcaagggcttctacccttccgatatcgccgtggaatgggagagcaatggccagcctgagaacaactacaagacaacccctcctgtgctggacagcgacggctcattcttcctgtacagcaagctgacagtggacaagagcagatggcagcagggcaacgtgttcagctgcagcgtgctgcatgaagccctgcacagccactacacccagaagtccctgtctctgagccccggcaagtgataa

SEQ ID NO: 224 - RNA, 1446 nt, synthetic construct
  source 1..1446: mol_type = other RNA
atggattggatttggagaatcctgttcctcgtgggcgccgctaccggagcccactcccagggcagactgtttcagtctggcgccgaagtgaaaagaccaggcgcctctgtgcggatcagctgcagagctgacgacgacccctacaccgacgacgataccttcaccaagtactggacccactggatcagacaggcccctggacaaagacctgagtggctgggagtgatcagccctcacttcgccagacctatctacagctacaagttccgggacagactgaccctgaccagagacagctctctgaccgccgtgtacctggaactgaagggcctgcagcctgacgacagcggcatctacttttgcgccagagatcccttcggcgacagagcccctcactacaactaccacatggacgtgtggggcggaggcacagccgtgatagttagcagcgcttccacaaagggccctagcgtgttccctctggctcctagcagcaagtctacaagcggaggaacagctgccctgggctgcctggtggaagattactttcctgagcctgtgaccgtgtcctggaacagcggtgctctgacttctggcgtgcacacctttccagccgtgctgcaaagcagcggcctgtactctctgagcagcgtggtcacagtgccaagctctagcctgggcacccagacctacatctgcaatgtgaaccacaagcctagcaacaccaaggtggacgacagagtggaacccaagagctgcgacaagacccacacctgtcctccatgtcctgctccagaactgctgggcggaccttccgtgttcctgtttcctccaaagcctaaggacaccctgatgatcagcagaacccctgaagtgacctgcgtggtggtggatgtgtctcacgaggaccctgaagtgaagttcaattggtacgtggacggcgtggaagtgcacaacgccaagaccaagcctagagaggaacagtacaacagcacctacagagtggtgtccgtgctgaccgtgctgcaccaggattggctgaacggcaaagagtacaagtgcaaggtgtccaacaaggccctgcctgcccctgaggaaaagaccatcagcaaggccaagggccagcctagggaaccccaggtttacaccctgcctccatgccgcgaggaaatgaccaagaaccaggtgtccctgtggtgcctggtcaagggcttctacccttccgatatcgccgtggaatgggagagcaatggccagcctgagaacaactacaagacaacccctcctgtgctggacagcgacggctcattcttcctgtacagcaagctgacagtggacaagagcagatggcagcagggcaacgtgttcagctgcagcgtgctgcatgaagccctgcacagccactacacccagaagtccctgtctctgagccccggcaagtgataa

SEQ ID NO: 225 - RNA, 1446 nt, synthetic construct
  source 1..1446: mol_type = other RNA
atggattggatttggagaatcctgttcctcgtgggcgccgctaccggagcccactcccagggcagactgtttcagtctggcgccgaagtgaaaagaccaggcgcctctgtgcggatcagctgcagagctgacgacgacccctacaccgacgacgataccttcaccaagtactggacccactggatcagacaggcccctggacaaagacctgagtggctgggagtgatcagccctcacttcgccagacctatctacagctacaagttccgggacagactgaccctgaccagagacagctctctgaccgccgtgtacctggaactgaagggcctgcagcctgacgacagcggcatctacttttgcgccagagatcccttcggcgacagagcccctcactacaactaccacatggacgtgtggggcggaggcacagccgtgatagttagcagcgcttccacaaagggccctagcgtgttccctctggctcctagcagcaagtctacaagcggaggaacagctgccctgggctgcctggtggaagattactttcctgagcctgtgaccgtgtcctggaacagcggtgctctgacttctggcgtgcacacctttccagccgtgctgcaaagcagcggcctgtactctctgagcagcgtggtcacagtgccaagctctagcctgggcacccagacctacatctgcaatgtgaaccacaagcctagcaacaccaaggtggacgacaaggtggaacccaagagctgcgacaagacccacacctgtcctccatgtcctgctccagaactgctcggcggaccttccgtgttcctgtttcctccaaagcctaaggacaccctgatgatcagcagaacccctgaagtgacctgcgtggtggtggatgtgtctcacgaggacccagaagtgaagttcaattggtacgtggacggcgtggaagtgcacaacgccaagaccaagcctagagaggaacagtacaacagcacctacagagtggtgtccgtgctgacagtgctgcaccaggattggctgaacggcaaagagtacaagtgcaaggtgtccaacaaggccctgcctgctcctatcgagaaaaccatcagcaaggccaagggccagcctagggaaccccaggtttacacactgcctccaagccgcgaggaaatgaccaagaaccaggtgtccctgacctgcctcgtgaagggcttctacccttccgatatcgccgtggaatgggagagcaatggccagcctgagaacaactacaagacaacccctcctgtgctggacagcgacggctcattcttcctgtacagcaagctgactgtggataagtcccggtggcagcagggcaacgtgttcagctgttctgtgatgcacgaagccctgcacaaccactacacccagaaaagcctgtctctgagccccggcaagtgataa

SEQ ID NO: 226 - RNA, 1446 nt, synthetic construct
  source 1..1446: mol_type = other RNA
atggattggatttggagaatcctgttcctcgtgggcgccgctaccggagcccactcccagggcagactgtttcagtctggcgccgaagtgaaaagaccaggcgcctctgtgcggatcagctgcagagctgacgacgacccctacaccgacgacgataccttcaccaagtactggacccactggatcagacaggcccctggacaaagacctgagtggctgggagtgatcagccctcacttcgccagacctatctacagctacaagttccgggacagactgaccctgaccagagacagctctctgaccgccgtgtacctggaactgaagggcctgcagcctgacgacagcggcatctacttttgcgccagagatcccttcggcgacagagcccctcactacaactaccacatggacgtgtggggcggaggcacagccgtgatagttagcagcgcttccacaaagggccctagcgtgttccctctggctcctagcagcaagtctacaagcggaggaacagctgccctgggctgcctggtggaagattactttcctgagcctgtgaccgtgtcctggaacagcggtgctctgacttctggcgtgcacacctttccagccgtgctgcaaagcagcggcctgtactctctgagcagcgtggtcacagtgccaagctctagcctgggcacccagacctacatctgcaatgtgaaccacaagcctagcaacaccaaggtggacgacaaggtggaacccaagagctgcgacaagacccacacctgtcctccatgtcctgctccagaactgctcggcggaccttccgtgttcctgtttcctccaaagcctaaggacaccctgatgatcagcagaacccctgaagtgacctgcgtggtggtggatgtgtctcacgaggacccagaagtgaagttcaattggtacgtggacggcgtggaagtgcacaacgccaagaccaagcctagagaggaacagtacaacagcacctacagagtggtgtccgtgctgacagtgctgcaccaggattggctgaacggcaaagagtacaagtgcaaggtgtccaacaaggccctgcctgctcctatcgagaaaaccatcagcaaggccaagggccagcctagggaaccccaggtttacacactgcctccaagccgcgaggaaatgaccaagaaccaggtgtccctgacctgcctcgtgaagggcttctacccttccgatatcgccgtggaatgggagagcaatggccagcctgagaacaactacaagacaacccctcctgtgctggacagcgacggctcattcttcctgtacagcaagctgaccgtggacaagtccagatggcagcagggcaacgtgttcagctgtagcgtgctgcacgaagccctgcacagccactacacccagaaaagcctgtctctgagccccggcaaatgataa

SEQ ID NO: 227 - RNA, 1446 nt, synthetic construct
  source 1..1446: mol_type = other RNA
atggattggatttggagaatcctgttcctcgtgggcgccgctaccggagcccactcccagggcagactgtttcagtctggcgccgaagtgaaaagaccaggcgcctctgtgcggatcagctgcagagctgacgacgacccctacaccgacgacgataccttcaccaagtactggacccactggatcagacaggcccctggacaaagacctgagtggctgggagtgatcagccctcacttcgccagacctatctacagctacaagttccgggacagactgaccctgaccagagacagctctctgaccgccgtgtacctggaactgaagggcctgcagcctgacgacagcggcatctacttttgcgccagagatcccttcggcgacagagcccctcactacaactaccacatggacgtgtggggcggaggcacagccgtgatagttagcagcgcttccacaaagggccctagcgtgttccctctggctcctagcagcaagtctacaagcggaggaacagctgccctgggctgcctggtggaagattactttcctgagcctgtgaccgtgtcctggaacagcggtgctctgacttctggcgtgcacacctttccagccgtgctgcaaagcagcggcctgtactctctgagcagcgtggtcacagtgccaagctctagcctgggcacccagacctacatctgcaatgtgaaccacaagcctagcaacaccaaggtggacgacaaggtggaacccaagagctgcgacaagacccacacctgtcctccatgtcctgctccagaactgctggccggaccttccgtgttcctgtttcctccaaagcctaaggacaccctgatgatcagcagaacccctgaagtgacctgcgtggtggtggatgtgtctcacgaggaccctgaagtgaagttcaattggtacgtggacggcgtggaagtgcacaacgccaagaccaagcctagagaggaacagtacaacagcacctacagagtggtgtccgtgctgaccgtgctgcaccaggattggctgaacggcaaagagtacaagtgcaaggtgtccaacaaggccctgcctctgcctgaggaaaagaccatcagcaaggccaagggccagcctagggaaccccaggtttacacactgcctccaagccgcgaggaaatgaccaagaaccaggtgtccctgacctgcctcgtgaagggcttctacccttccgatatcgccgtggaatgggagagcaatggccagcctgagaacaactacaagacaacccctcctgtgctggacagcgacggctcattcttcctgtacagcaagctgaccgtggacaagtccagatggcagcagggcaacgtgttcagctgtagcgtgctgcacgaagccctgcacagccactacacccagaaaagcctgtctctgagccccggcaaatgataa

SEQ ID NO: 228 - RNA, 1446 nt, synthetic construct
  source 1..1446: mol_type = other RNA
atggattggatttggagaatcctgttcctcgtgggcgccgctaccggagcccactcccagggcagactgtttcagtctggcgccgaagtgaaaagaccaggcgcctctgtgcggatcagctgcagagctgacgacgacccctacaccgacgacgataccttcaccaagtactggacccactggatcagacaggcccctggacaaagacctgagtggctgggagtgatcagccctcacttcgccagacctatctacagctacaagttccgggacagactgaccctgaccagagacagctctctgaccgccgtgtacctggaactgaagggcctgcagcctgacgacagcggcatctacttttgcgccagagatcccttcggcgacagagcccctcactacaactaccacatggacgtgtggggcggaggcacagccgtgatagttagcagcgcttccacaaagggccctagcgtgttccctctggctcctagcagcaagtctacaagcggaggaacagctgccctgggctgcctggtggaagattactttcctgagcctgtgaccgtgtcctggaacagcggtgctctgacttctggcgtgcacacctttccagccgtgctgcaaagcagcggcctgtactctctgagcagcgtggtcacagtgccaagctctagcctgggcacccagacctacatctgcaatgtgaaccacaagcctagcaacaccaaggtggacgacaaggtggaacccaagagctgcgacaagacccacacctgtcctccatgtcctgctccagaactgctggccggaccttccgtgttcctgtttcctccaaagcctaaggacaccctgatgatcagcagaacccctgaagtgacctgcgtggtggtggatgtgtctcacgaggaccctgaagtgaagttcaattggtacgtggacggcgtggaagtgcacaacgccaagaccaagcctagagaggaacagtacaacagcacctacagagtggtgtccgtgctgaccgtgctgcaccaggattggctgaacggcaaagagtacaagtgcaaggtgtccaacaaggccctgcctgcccctgaggaaaagaccatcagcaaggccaagggccagcctagggaaccccaggtttacacactgcctccaagccgcgaggaaatgaccaagaaccaggtgtccctgacctgcctcgtgaagggcttctacccttccgatatcgccgtggaatgggagagcaatggccagcctgagaacaactacaagacaacccctcctgtgctggacagcgacggctcattcttcctgtacagcaagctgaccgtggacaagtccagatggcagcagggcaacgtgttcagctgtagcgtgctgcacgaagccctgcacagccactacacccagaaaagcctgtctctgagccccggcaaatgataa

SEQ ID NO: 229 - RNA, 1446 nt, synthetic construct
  source 1..1446: mol_type = other RNA
atggattggatttggagaatcctgttcctcgtgggcgccgctaccggagcccactcccagggcagactgtttcagtctggcgccgaagtgaaaagaccaggcgcctctgtgcggatcagctgcagagctgacgacgacccctacaccgacgacgataccttcaccaagtactggacccactggatcagacaggcccctggacaaagacctgagtggctgggagtgatcagccctcacttcgccagacctatctacagctacaagttccgggacagactgaccctgaccagagacagctctctgaccgccgtgtacctggaactgaagggcctgcagcctgacgacagcggcatctacttttgcgccagagatcccttcggcgacagagcccctcactacaactaccacatggacgtgtggggcggaggcacagccgtgatagttagcagcgcttccacaaagggccctagcgtgttccctctggctcctagcagcaagtctacaagcggaggaacagctgccctgggctgcctggtggaagattactttcctgagcctgtgaccgtgtcctggaacagcggtgctctgacttctggcgtgcacacctttccagccgtgctgcaaagcagcggcctgtactctctgagcagcgtggtcacagtgccaagctctagcctgggcacccagacctacatctgcaatgtgaaccacaagcctagcaacaccaaggtggacgacaaggtggaacccaagagctgcgacaagacccacacctgtcctccatgtcctgctccagaactgctggccggaccttccgtgttcctgtttcctccaaagcctaaggacaccctgatgatcagcagaacccctgaagtgacctgcgtggtggtggatgtgtctcacgaggaccctgaagtgaagttcaattggtacgtggacggcgtggaagtgcacaacgccaagaccaagcctagagaggaacagtacaacagcacctacagagtggtgtccgtgctgaccgtgctgcaccaggattggctgaacggcaaagagtacaagtgcaaggtgtccaacaaggccctgcctgcccctatcgaaaagaccatcagcaaggccaagggccagcctagggaaccccaggtttacacactgcctccaagccgcgaggaaatgaccaagaaccaggtgtccctgacctgcctcgtgaagggcttctacccttccgatatcgccgtggaatgggagagcaatggccagcctgagaacaactacaagacaacccctcctgtgctggacagcgacggctcattcttcctgtacagcaagctgaccgtggacaagtccagatggcagcagggcaacgtgttcagctgtagcgtgctgcacgaagccctgcacagccactacacccagaaaagcctgtctctgagccccggcaaatgataa

SEQ ID NO: 230 - RNA, 1446 nt, synthetic construct
  source 1..1446: mol_type = other RNA
atggattggatttggagaatcctgttcctcgtgggcgccgctaccggagcccactcccagggcagactgtttcagtctggcgccgaagtgaaaagaccaggcgcctctgtgcggatcagctgcagagctgacgacgacccctacaccgacgacgataccttcaccaagtactggacccactggatcagacaggcccctggacaaagacctgagtggctgggagtgatcagccctcacttcgccagacctatctacagctacaagttccgggacagactgaccctgaccagagacagctctctgaccgccgtgtacctggaactgaagggcctgcagcctgacgacagcggcatctacttttgcgccagagatcccttcggcgacagagcccctcactacaactaccacatggacgtgtggggcggaggcacagccgtgatagttagcagcgcttccacaaagggccctagcgtgttccctctggctcctagcagcaagtctacaagcggaggaacagctgccctgggctgcctggtggaagattactttcctgagcctgtgaccgtgtcctggaacagcggtgctctgacttctggcgtgcacacctttccagccgtgctgcaaagcagcggcctgtactctctgagcagcgtggtcacagtgccaagctctagcctgggcacccagacctacatctgcaatgtgaaccacaagcctagcaacaccaaggtggacgacaaggtggaacccaagagctgcgacaagacccacacctgtcctccatgtcctgctccagaactgctgggcggaccttccgtgttcctgtttcctccaaagcctaaggacaccctgatgatcagcagaacccctgaagtgacctgcgtggtggtggatgtgtctcacgaggaccctgaagtgaagttcaattggtacgtggacggcgtggaagtgcacaacgccaagaccaagcctagagaggaacagtacaacagcacctacagagtggtgtccgtgctgaccgtgctgcaccaggattggctgaacggcaaagagtacaagtgcaaggtgtccaacaaggccctgcctgcccctgaggaaaagaccatcagcaaggccaagggccagcctagggaaccccaggtttacacactgcctccaagccgcgaggaaatgaccaagaaccaggtgtccctgacctgcctcgtgaagggcttctacccttccgatatcgccgtggaatgggagagcaatggccagcctgagaacaactacaagacaacccctcctgtgctggacagcgacggctcattcttcctgtacagcaagctgaccgtggacaagtccagatggcagcagggcaacgtgttcagctgtagcgtgctgcacgaagccctgcacagccactacacccagaaaagcctgtctctgagccccggcaaatgataa

SEQ ID NO: 231 - RNA, 1446 nt, synthetic construct
  source 1..1446: mol_type = other RNA
atggattggatttggagaatcctgttcctcgtgggcgccgctaccggagcccactcccagggcagactgtttcagtctggcgccgaagtgaaaagaccaggcgcctctgtgcggatcagctgcagagctgacgacgacccctacaccgacgacgataccttcaccaagtactggacccactggatcagacaggcccctggacaaagacctgagtggctgggagtgatcagccctcacttcgccagacctatctacagctacaagttccgggacagactgaccctgaccagagacagctctctgaccgccgtgtacctggaactgaagggcctgcagcctgacgacagcggcatctacttttgcgccagagatcccttcggcgacagagcccctcactacaactaccacatggacgtgtggggcggaggcacagccgtgatagttagcagcgcttccacaaagggccctagcgtgttccctctggctcctagcagcaagtctacaagcggaggaacagctgccctgggctgcctggtggaagattactttcctgagcctgtgaccgtgtcctggaacagcggtgctctgacttctggcgtgcacacctttccagccgtgctgcaaagcagcggcctgtactctctgagcagcgtggtcacagtgccaagctctagcctgggcacccagacctacatctgcaatgtgaaccacaagcctagcaacaccaaggtggacgacaaggtggaacccaagagctgcgacaagacccacacctgtcctccatgtcctgctccagaactgctcggcggaccttccgtgttcctgtttcctccaaagcctaaggacaccctgatgatcagcagaacccctgaagtgacctgcgtggtggtggatgtgtctcacgaggacccagaagtgaagttcaattggtacgtggacggcgtggaagtgcacaacgccaagaccaagcctagagaggaacagtacaacagcacctacagagtggtgtccgtgctgacagtgctgcaccaggattggctgaacggcaaagagtacaagtgcaaggtgtccaacaaggccctgcctgctcctatcgagaaaaccatcagcaaggccaagggccagcctcgcgaacctcaagtctgtacactgcctcctagccgcgaggaaatgaccaagaaccaggtgtccctgagctgcgccgtgaagggcttttacccttccgatatcgccgtggaatgggagagcaatggccagcctgagaacaactacaagacaacccctcctgtgctggacagcgacggctcattcttcctggtgtccaagctgacagtggacaagagcagatggcagcagggcaacgtgttcagctgcagcgtgctgcatgaagccctgcacagccactacacccagaagtccctgtctctgagccccggcaagtgataa

SEQ ID NO: 232 - RNA, 1446 nt, synthetic construct
  source 1..1446: mol_type = other RNA
atggattggatttggagaatcctgttcctcgtgggcgccgctaccggagcccactcccagggcagactgtttcagtctggcgccgaagtgaaaagaccaggcgcctctgtgcggatcagctgcagagctgacgacgacccctacaccgacgacgataccttcaccaagtactggacccactggatcagacaggcccctggacaaagacctgagtggctgggagtgatcagccctcacttcgccagacctatctacagctacaagttccgggacagactgaccctgaccagagacagctctctgaccgccgtgtacctggaactgaagggcctgcagcctgacgacagcggcatctacttttgcgccagagatcccttcggcgacagagcccctcactacaactaccacatggacgtgtggggcggaggcacagccgtgatagttagcagcgcttccacaaagggccctagcgtgttccctctggctcctagcagcaagtctacaagcggaggaacagctgccctgggctgcctggtggaagattactttcctgagcctgtgaccgtgtcctggaacagcggtgctctgacttctggcgtgcacacctttccagccgtgctgcaaagcagcggcctgtactctctgagcagcgtggtcacagtgccaagctctagcctgggcacccagacctacatctgcaatgtgaaccacaagcctagcaacaccaaggtggacgacaaggtggaacccaagagctgcgacaagacccacacctgtcctccatgtcctgctccagaactgctggccggaccttccgtgttcctgtttcctccaaagcctaaggacaccctgatgatcagcagaacccctgaagtgacctgcgtggtggtggatgtgtctcacgaggaccctgaagtgaagttcaattggtacgtggacggcgtggaagtgcacaacgccaagaccaagcctagagaggaacagtacaacagcacctacagagtggtgtccgtgctgaccgtgctgcaccaggattggctgaacggcaaagagtacaagtgcaaggtgtccaacaaggccctgcctctgcctgaggaaaagaccatcagcaaggccaagggccagcctcgcgaacctcaagtctgtacactgcctcctagccgcgaggaaatgaccaagaaccaggtgtccctgagctgcgccgtgaagggcttttacccttccgatatcgccgtggaatgggagagcaatggccagcctgagaacaactacaagacaacccctcctgtgctggacagcgacggctcattcttcctggtgtccaagctgacagtggacaagagcagatggcagcagggcaacgtgttcagctgcagcgtgctgcatgaagccctgcacagccactacacccagaagtccctgtctctgagccccggcaagtgataa

SEQ ID NO: 233 - RNA, 1446 nt, synthetic construct
  source 1..1446: mol_type = other RNA
atggattggatttggagaatcctgttcctcgtgggcgccgctaccggagcccactcccagggcagactgtttcagtctggcgccgaagtgaaaagaccaggcgcctctgtgcggatcagctgcagagctgacgacgacccctacaccgacgacgataccttcaccaagtactggacccactggatcagacaggcccctggacaaagacctgagtggctgggagtgatcagccctcacttcgccagacctatctacagctacaagttccgggacagactgaccctgaccagagacagctctctgaccgccgtgtacctggaactgaagggcctgcagcctgacgacagcggcatctacttttgcgccagagatcccttcggcgacagagcccctcactacaactaccacatggacgtgtggggcggaggcacagccgtgatagttagcagcgcttccacaaagggccctagcgtgttccctctggctcctagcagcaagtctacaagcggaggaacagctgccctgggctgcctggtggaagattactttcctgagcctgtgaccgtgtcctggaacagcggtgctctgacttctggcgtgcacacctttccagccgtgctgcaaagcagcggcctgtactctctgagcagcgtggtcacagtgccaagctctagcctgggcacccagacctacatctgcaatgtgaaccacaagcctagcaacaccaaggtggacgacaaggtggaacccaagagctgcgacaagacccacacctgtcctccatgtcctgctccagaactgctggccggaccttccgtgttcctgtttcctccaaagcctaaggacaccctgatgatcagcagaacccctgaagtgacctgcgtggtggtggatgtgtctcacgaggaccctgaagtgaagttcaattggtacgtggacggcgtggaagtgcacaacgccaagaccaagcctagagaggaacagtacaacagcacctacagagtggtgtccgtgctgaccgtgctgcaccaggattggctgaacggcaaagagtacaagtgcaaggtgtccaacaaggccctgcctgcccctgaggaaaagaccatcagcaaggccaagggccagcctcgcgaacctcaagtctgtacactgcctcctagccgcgaggaaatgaccaagaaccaggtgtccctgagctgcgccgtgaagggcttttacccttccgatatcgccgtggaatgggagagcaatggccagcctgagaacaactacaagacaacccctcctgtgctggacagcgacggctcattcttcctggtgtccaagctgacagtggacaagagcagatggcagcagggcaacgtgttcagctgcagcgtgctgcatgaagccctgcacagccactacacccagaagtccctgtctctgagccccggcaagtgataa

SEQ ID NO: 234 - RNA, 1446 nt, synthetic construct
  source 1..1446: mol_type = other RNA
atggattggatttggagaatcctgttcctcgtgggcgccgctaccggagcccactcccagggcagactgtttcagtctggcgccgaagtgaaaagaccaggcgcctctgtgcggatcagctgcagagctgacgacgacccctacaccgacgacgataccttcaccaagtactggacccactggatcagacaggcccctggacaaagacctgagtggctgggagtgatcagccctcacttcgccagacctatctacagctacaagttccgggacagactgaccctgaccagagacagctctctgaccgccgtgtacctggaactgaagggcctgcagcctgacgacagcggcatctacttttgcgccagagatcccttcggcgacagagcccctcactacaactaccacatggacgtgtggggcggaggcacagccgtgatagttagcagcgcttccacaaagggccctagcgtgttccctctggctcctagcagcaagtctacaagcggaggaacagctgccctgggctgcctggtggaagattactttcctgagcctgtgaccgtgtcctggaacagcggtgctctgacttctggcgtgcacacctttccagccgtgctgcaaagcagcggcctgtactctctgagcagcgtggtcacagtgccaagctctagcctgggcacccagacctacatctgcaatgtgaaccacaagcctagcaacaccaaggtggacgacaaggtggaacccaagagctgcgacaagacccacacctgtcctccatgtcctgctccagaactgctggccggaccttccgtgttcctgtttcctccaaagcctaaggacaccctgatgatcagcagaacccctgaagtgacctgcgtggtggtggatgtgtctcacgaggaccctgaagtgaagttcaattggtacgtggacggcgtggaagtgcacaacgccaagaccaagcctagagaggaacagtacaacagcacctacagagtggtgtccgtgctgaccgtgctgcaccaggattggctgaacggcaaagagtacaagtgcaaggtgtccaacaaggccctgcctgcccctatcgaaaagaccatcagcaaggccaagggccagcctcgcgaacctcaagtctgtacactgcctcctagccgcgaggaaatgaccaagaaccaggtgtccctgagctgcgccgtgaagggcttttacccttccgatatcgccgtggaatgggagagcaatggccagcctgagaacaactacaagacaacccctcctgtgctggacagcgacggctcattcttcctggtgtccaagctgacagtggacaagagcagatggcagcagggcaacgtgttcagctgcagcgtgctgcatgaagccctgcacagccactacacccagaagtccctgtctctgagccccggcaagtgataa

SEQ ID NO: 235 - RNA, 1446 nt, synthetic construct
  source 1..1446: mol_type = other RNA
atggattggatttggagaatcctgttcctcgtgggcgccgctaccggagcccactcccagggcagactgtttcagtctggcgccgaagtgaaaagaccaggcgcctctgtgcggatcagctgcagagctgacgacgacccctacaccgacgacgataccttcaccaagtactggacccactggatcagacaggcccctggacaaagacctgagtggctgggagtgatcagccctcacttcgccagacctatctacagctacaagttccgggacagactgaccctgaccagagacagctctctgaccgccgtgtacctggaactgaagggcctgcagcctgacgacagcggcatctacttttgcgccagagatcccttcggcgacagagcccctcactacaactaccacatggacgtgtggggcggaggcacagccgtgatagttagcagcgcttccacaaagggccctagcgtgttccctctggctcctagcagcaagtctacaagcggaggaacagctgccctgggctgcctggtggaagattactttcctgagcctgtgaccgtgtcctggaacagcggtgctctgacttctggcgtgcacacctttccagccgtgctgcaaagcagcggcctgtactctctgagcagcgtggtcacagtgccaagctctagcctgggcacccagacctacatctgcaatgtgaaccacaagcctagcaacaccaaggtggacgacaaggtggaacccaagagctgcgacaagacccacacctgtcctccatgtcctgctccagaactgctgggcggaccttccgtgttcctgtttcctccaaagcctaaggacaccctgatgatcagcagaacccctgaagtgacctgcgtggtggtggatgtgtctcacgaggaccctgaagtgaagttcaattggtacgtggacggcgtggaagtgcacaacgccaagaccaagcctagagaggaacagtacaacagcacctacagagtggtgtccgtgctgaccgtgctgcaccaggattggctgaacggcaaagagtacaagtgcaaggtgtccaacaaggccctgcctgcccctgaggaaaagaccatcagcaaggccaagggccagcctcgcgaacctcaagtctgtacactgcctcctagccgcgaggaaatgaccaagaaccaggtgtccctgagctgcgccgtgaagggcttttacccttccgatatcgccgtggaatgggagagcaatggccagcctgagaacaactacaagacaacccctcctgtgctggacagcgacggctcattcttcctggtgtccaagctgacagtggacaagagcagatggcagcagggcaacgtgttcagctgcagcgtgctgcatgaagccctgcacagccactacacccagaagtccctgtctctgagccccggcaagtgataa

SEQ ID NO: 236 - RNA, 1446 nt, synthetic construct
  source 1..1446: mol_type = other RNA
atggattggatttggagaatcctgttcctcgtgggcgccgctaccggagcccactcccagggcagactgtttcagtctggcgccgaagtgaaaagaccaggcgcctctgtgcggatcagctgcagagctgacgacgacccctacaccgacgacgataccttcaccaagtactggacccactggatcagacaggcccctggacaaagacctgagtggctgggagtgatcagccctcacttcgccagacctatctacagctacaagttccgggacagactgaccctgaccagagacagctctctgaccgccgtgtacctggaactgaagggcctgcagcctgacgacagcggcatctacttttgcgccagagatcccttcggcgacagagcccctcactacaactaccacatggacgtgtggggcggaggcacagccgtgatagttagcagcgcttccacaaagggccctagcgtgttccctctggctcctagcagcaagtctacaagcggaggaacagctgccctgggctgcctggtggaagattactttcctgagcctgtgaccgtgtcctggaacagcggtgctctgacttctggcgtgcacacctttccagccgtgctgcaaagcagcggcctgtactctctgagcagcgtggtcacagtgccaagctctagcctgggcacccagacctacatctgcaatgtgaaccacaagcctagcaacaccaaggtggacgacaaggtggaacccaagagctgcgacaagacccacacctgtcctccatgtcctgctccagaactgctcggcggaccttccgtgttcctgtttcctccaaagcctaaggacaccctgatgatcagcagaacccctgaagtgacctgcgtggtggtggatgtgtctcacgaggacccagaagtgaagttcaattggtacgtggacggcgtggaagtgcacaacgccaagaccaagcctagagaggaacagtacaacagcacctacagagtggtgtccgtgctgacagtgctgcaccaggattggctgaacggcaaagagtacaagtgcaaggtgtccaacaaggccctgcctgctcctatcgagaaaaccatcagcaaggccaagggccagcctagggaaccccaggtttacaccctgcctccatgccgcgaggaaatgaccaagaaccaggtgtccctgtggtgcctggtcaagggcttctacccttccgatatcgccgtggaatgggagagcaatggccagcctgagaacaactacaagacaacccctcctgtgctggacagcgacggctcattcttcctgtacagcaagctgacagtggacaagagcagatggcagcagggcaacgtgttcagctgcagcgtgctgcatgaagccctgcacagccactacacccagaagtccctgtctctgagccccggcaagtgataa

SEQ ID NO: 237 - RNA, 1446 nt, synthetic construct
  source 1..1446: mol_type = other RNA
atggattggatttggagaatcctgttcctcgtgggcgccgctaccggagcccactcccagggcagactgtttcagtctggcgccgaagtgaaaagaccaggcgcctctgtgcggatcagctgcagagctgacgacgacccctacaccgacgacgataccttcaccaagtactggacccactggatcagacaggcccctggacaaagacctgagtggctgggagtgatcagccctcacttcgccagacctatctacagctacaagttccgggacagactgaccctgaccagagacagctctctgaccgccgtgtacctggaactgaagggcctgcagcctgacgacagcggcatctacttttgcgccagagatcccttcggcgacagagcccctcactacaactaccacatggacgtgtggggcggaggcacagccgtgatagttagcagcgcttccacaaagggccctagcgtgttccctctggctcctagcagcaagtctacaagcggaggaacagctgccctgggctgcctggtggaagattactttcctgagcctgtgaccgtgtcctggaacagcggtgctctgacttctggcgtgcacacctttccagccgtgctgcaaagcagcggcctgtactctctgagcagcgtggtcacagtgccaagctctagcctgggcacccagacctacatctgcaatgtgaaccacaagcctagcaacaccaaggtggacgacaaggtggaacccaagagctgcgacaagacccacacctgtcctccatgtcctgctccagaactgctggccggaccttccgtgttcctgtttcctccaaagcctaaggacaccctgatgatcagcagaacccctgaagtgacctgcgtggtggtggatgtgtctcacgaggaccctgaagtgaagttcaattggtacgtggacggcgtggaagtgcacaacgccaagaccaagcctagagaggaacagtacaacagcacctacagagtggtgtccgtgctgaccgtgctgcaccaggattggctgaacggcaaagagtacaagtgcaaggtgtccaacaaggccctgcctctgcctgaggaaaagaccatcagcaaggccaagggccagcctagggaaccccaggtttacaccctgcctccatgccgcgaggaaatgaccaagaaccaggtgtccctgtggtgcctggtcaagggcttctacccttccgatatcgccgtggaatgggagagcaatggccagcctgagaacaactacaagacaacccctcctgtgctggacagcgacggctcattcttcctgtacagcaagctgacagtggacaagagcagatggcagcagggcaacgtgttcagctgcagcgtgctgcatgaagccctgcacagccactacacccagaagtccctgtctctgagccccggcaagtgataa

SEQ ID NO: 238 - RNA, 1446 nt, synthetic construct
  source 1..1446: mol_type = other RNA
atggattggatttggagaatcctgttcctcgtgggcgccgctaccggagcccactcccagggcagactgtttcagtctggcgccgaagtgaaaagaccaggcgcctctgtgcggatcagctgcagagctgacgacgacccctacaccgacgacgataccttcaccaagtactggacccactggatcagacaggcccctggacaaagacctgagtggctgggagtgatcagccctcacttcgccagacctatctacagctacaagttccgggacagactgaccctgaccagagacagctctctgaccgccgtgtacctggaactgaagggcctgcagcctgacgacagcggcatctacttttgcgccagagatcccttcggcgacagagcccctcactacaactaccacatggacgtgtggggcggaggcacagccgtgatagttagcagcgcttccacaaagggccctagcgtgttccctctggctcctagcagcaagtctacaagcggaggaacagctgccctgggctgcctggtggaagattactttcctgagcctgtgaccgtgtcctggaacagcggtgctctgacttctggcgtgcacacctttccagccgtgctgcaaagcagcggcctgtactctctgagcagcgtggtcacagtgccaagctctagcctgggcacccagacctacatctgcaatgtgaaccacaagcctagcaacaccaaggtggacgacaaggtggaacccaagagctgcgacaagacccacacctgtcctccatgtcctgctccagaactgctggccggaccttccgtgttcctgtttcctccaaagcctaaggacaccctgatgatcagcagaacccctgaagtgacctgcgtggtggtggatgtgtctcacgaggaccctgaagtgaagttcaattggtacgtggacggcgtggaagtgcacaacgccaagaccaagcctagagaggaacagtacaacagcacctacagagtggtgtccgtgctgaccgtgctgcaccaggattggctgaacggcaaagagtacaagtgcaaggtgtccaacaaggccctgcctgcccctgaggaaaagaccatcagcaaggccaagggccagcctagggaaccccaggtttacaccctgcctccatgccgcgaggaaatgaccaagaaccaggtgtccctgtggtgcctggtcaagggcttctacccttccgatatcgccgtggaatgggagagcaatggccagcctgagaacaactacaagacaacccctcctgtgctggacagcgacggctcattcttcctgtacagcaagctgacagtggacaagagcagatggcagcagggcaacgtgttcagctgcagcgtgctgcatgaagccctgcacagccactacacccagaagtccctgtctctgagccccggcaagtgataa

SEQ ID NO: 239 - RNA, 1446 nt, synthetic construct
  source 1..1446: mol_type = other RNA
atggattggatttggagaatcctgttcctcgtgggcgccgctaccggagcccactcccagggcagactgtttcagtctggcgccgaagtgaaaagaccaggcgcctctgtgcggatcagctgcagagctgacgacgacccctacaccgacgacgataccttcaccaagtactggacccactggatcagacaggcccctggacaaagacctgagtggctgggagtgatcagccctcacttcgccagacctatctacagctacaagttccgggacagactgaccctgaccagagacagctctctgaccgccgtgtacctggaactgaagggcctgcagcctgacgacagcggcatctacttttgcgccagagatcccttcggcgacagagcccctcactacaactaccacatggacgtgtggggcggaggcacagccgtgatagttagcagcgcttccacaaagggccctagcgtgttccctctggctcctagcagcaagtctacaagcggaggaacagctgccctgggctgcctggtggaagattactttcctgagcctgtgaccgtgtcctggaacagcggtgctctgacttctggcgtgcacacctttccagccgtgctgcaaagcagcggcctgtactctctgagcagcgtggtcacagtgccaagctctagcctgggcacccagacctacatctgcaatgtgaaccacaagcctagcaacaccaaggtggacgacaaggtggaacccaagagctgcgacaagacccacacctgtcctccatgtcctgctccagaactgctggccggaccttccgtgttcctgtttcctccaaagcctaaggacaccctgatgatcagcagaacccctgaagtgacctgcgtggtggtggatgtgtctcacgaggaccctgaagtgaagttcaattggtacgtggacggcgtggaagtgcacaacgccaagaccaagcctagagaggaacagtacaacagcacctacagagtggtgtccgtgctgaccgtgctgcaccaggattggctgaacggcaaagagtacaagtgcaaggtgtccaacaaggccctgcctgcccctatcgaaaagaccatcagcaaggccaagggccagcctagggaaccccaggtttacaccctgcctccatgccgcgaggaaatgaccaagaaccaggtgtccctgtggtgcctggtcaagggcttctacccttccgatatcgccgtggaatgggagagcaatggccagcctgagaacaactacaagacaacccctcctgtgctggacagcgacggctcattcttcctgtacagcaagctgacagtggacaagagcagatggcagcagggcaacgtgttcagctgcagcgtgctgcatgaagccctgcacagccactacacccagaagtccctgtctctgagccccggcaagtgataa

SEQ ID NO: 240 - RNA, 1446 nt, synthetic construct
  source 1..1446: mol_type = other RNA
atggattggatttggagaatcctgttcctcgtgggcgccgctaccggagcccactcccagggcagactgtttcagtctggcgccgaagtgaaaagaccaggcgcctctgtgcggatcagctgcagagctgacgacgacccctacaccgacgacgataccttcaccaagtactggacccactggatcagacaggcccctggacaaagacctgagtggctgggagtgatcagccctcacttcgccagacctatctacagctacaagttccgggacagactgaccctgaccagagacagctctctgaccgccgtgtacctggaactgaagggcctgcagcctgacgacagcggcatctacttttgcgccagagatcccttcggcgacagagcccctcactacaactaccacatggacgtgtggggcggaggcacagccgtgatagttagcagcgcttccacaaagggccctagcgtgttccctctggctcctagcagcaagtctacaagcggaggaacagctgccctgggctgcctggtggaagattactttcctgagcctgtgaccgtgtcctggaacagcggtgctctgacttctggcgtgcacacctttccagccgtgctgcaaagcagcggcctgtactctctgagcagcgtggtcacagtgccaagctctagcctgggcacccagacctacatctgcaatgtgaaccacaagcctagcaacaccaaggtggacgacaaggtggaacccaagagctgcgacaagacccacacctgtcctccatgtcctgctccagaactgctgggcggaccttccgtgttcctgtttcctccaaagcctaaggacaccctgatgatcagcagaacccctgaagtgacctgcgtggtggtggatgtgtctcacgaggaccctgaagtgaagttcaattggtacgtggacggcgtggaagtgcacaacgccaagaccaagcctagagaggaacagtacaacagcacctacagagtggtgtccgtgctgaccgtgctgcaccaggattggctgaacggcaaagagtacaagtgcaaggtgtccaacaaggccctgcctgcccctgaggaaaagaccatcagcaaggccaagggccagcctagggaaccccaggtttacaccctgcctccatgccgcgaggaaatgaccaagaaccaggtgtccctgtggtgcctggtcaagggcttctacccttccgatatcgccgtggaatgggagagcaatggccagcctgagaacaactacaagacaacccctcctgtgctggacagcgacggctcattcttcctgtacagcaagctgacagtggacaagagcagatggcagcagggcaacgtgttcagctgcagcgtgctgcatgaagccctgcacagccactacacccagaagtccctgtctctgagccccggcaagtgataa

SEQ ID NO: 241 - RNA, 1446 nt, synthetic construct
  source 1..1446: mol_type = other RNA
atggattggatttggagaatcctgttcctcgtgggcgccgctaccggagcccactcccagggcagactgtttcagtctggcgccgaagtgaaaagaccaggcgcctctgtgcggatcagctgcagagctgacgacgacccctacaccgacgacgataccttcaccaagtactggacccactggatcagacaggcccctggacaaagacctgagtggctgggagtgatcagccctcacttcgccagacctatctacagctacaagttccgggacagactgaccctgaccagagacagctctctgaccgccgtgtacctggaactgaagggcctgcagcctgacgacagcggcatctacttttgcgccagagatcccttcggcgacagagcccctcactacaactaccacatggacgtgtggggcggaggcacagccgtgatagttagcagcgcttccacaaagggccctagcgtgttccctctggctcctagcagcaagtctacaagcggaggaacagctgccctgggctgcctggtggaagattactttcctgagcctgtgaccgtgtcctggaacagcggtgctctgacttctggcgtgcacacctttccagccgtgctgcaaagcagcggcctgtactctctgagcagcgtggtcacagtgccaagctctagcctgggcacccagacctacatctgcaatgtgaaccacaagcctagcaacaccaaggtggacgacaaggtggaacccaagagctgcgacaagacccacacctgtcctccatgtcctgctccagaactgctcggcggaccttccgtgttcctgtttcctccaaagcctaaggacaccctgatgatcagcagaacccctgaagtgacctgcgtggtggtggatgtgtctcacgaggacccagaagtgaagttcaattggtacgtggacggcgtggaagtgcacaacgccaagaccaagcctagagaggaacagtacaacagcacctacagagtggtgtccgtgctgacagtgctgcaccaggattggctgaacggcaaagagtacaagtgcaaggtgtccaacaaggccctgcctgctcctatcgagaaaaccatcagcaaggccaagggccagcctagggaaccccaggtttacacactgcctccaagccgcgacgaactgaccaagaaccaggtgtccctgacctgcctcgtgaagggcttctacccttccgatatcgccgtggaatgggagagcaatggccagcctgagaacaactacaagacaacccctcctgtgctggacagcgacggctcattcttcctgtacagcaagctgactgtggataagtcccggtggcagcagggcaacgtgttcagctgttctgtgatgcacgaagccctgcacaaccactacacccagaaaagcctgtctctgagccccggcaagtgataa

SEQ ID NO: 242 - RNA, 1446 nt, synthetic construct
  source 1..1446: mol_type = other RNA
atggattggatttggagaatcctgttcctcgtgggcgccgctaccggagcccactcccagggcagactgtttcagtctggcgccgaagtgaaaagaccaggcgcctctgtgcggatcagctgcagagctgacgacgacccctacaccgacgacgataccttcaccaagtactggacccactggatcagacaggcccctggacaaagacctgagtggctgggagtgatcagccctcacttcgccagacctatctacagctacaagttccgggacagactgaccctgaccagagacagctctctgaccgccgtgtacctggaactgaagggcctgcagcctgacgacagcggcatctacttttgcgccagagatcccttcggcgacagagcccctcactacaactaccacatggacgtgtggggcggaggcacagccgtgatagttagcagcgcttccacaaagggccctagcgtgttccctctggctcctagcagcaagtctacaagcggaggaacagctgccctgggctgcctggtggaagattactttcctgagcctgtgaccgtgtcctggaacagcggtgctctgacttctggcgtgcacacctttccagccgtgctgcaaagcagcggcctgtactctctgagcagcgtggtcacagtgccaagctctagcctgggcacccagacctacatctgcaatgtgaaccacaagcctagcaacaccaaggtggacgacaaggtggaacccaagagctgcgacaagacccacacctgtcctccatgtcctgctccagaactgctcggcggaccttccgtgttcctgtttcctccaaagcctaaggacaccctgatgatcagcagaacccctgaagtgacctgcgtggtggtggatgtgtctcacgaggacccagaagtgaagttcaattggtacgtggacggcgtggaagtgcacaacgccaagaccaagcctagagaggaacagtacaacagcacctacagagtggtgtccgtgctgacagtgctgcaccaggattggctgaacggcaaagagtacaagtgcaaggtgtccaacaaggccctgcctgctcctatcgagaaaaccatcagcaaggccaagggccagcctagggaaccccaggtttacacactgcctccaagccgcgacgaactgaccaagaaccaggtgtccctgacctgcctcgtgaagggcttctacccttccgatatcgccgtggaatgggagagcaatggccagcctgagaacaactacaagacaacccctcctgtgctggacagcgacggctcattcttcctgtacagcaagctgaccgtggacaagtccagatggcagcagggcaacgtgttcagctgtagcgtgctgcacgaagccctgcacagccactacacccagaaaagcctgtctctgagccccggcaaatgataa

SEQ ID NO: 243 - RNA, 1446 nt, synthetic construct
  source 1..1446: mol_type = other RNA
atggattggatttggagaatcctgttcctcgtgggcgccgctaccggagcccactcccagggcagactgtttcagtctggcgccgaagtgaaaagaccaggcgcctctgtgcggatcagctgcagagctgacgacgacccctacaccgacgacgataccttcaccaagtactggacccactggatcagacaggcccctggacaaagacctgagtggctgggagtgatcagccctcacttcgccagacctatctacagctacaagttccgggacagactgaccctgaccagagacagctctctgaccgccgtgtacctggaactgaagggcctgcagcctgacgacagcggcatctacttttgcgccagagatcccttcggcgacagagcccctcactacaactaccacatggacgtgtggggcggaggcacagccgtgatagttagcagcgcttccacaaagggccctagcgtgttccctctggctcctagcagcaagtctacaagcggaggaacagctgccctgggctgcctggtggaagattactttcctgagcctgtgaccgtgtcctggaacagcggtgctctgacttctggcgtgcacacctttccagccgtgctgcaaagcagcggcctgtactctctgagcagcgtggtcacagtgccaagctctagcctgggcacccagacctacatctgcaatgtgaaccacaagcctagcaacaccaaggtggacgacaaggtggaacccaagagctgcgacaagacccacacctgtcctccatgtcctgctccagaactgctggccggaccttccgtgttcctgtttcctccaaagcctaaggacaccctgatgatcagcagaacccctgaagtgacctgcgtggtggtggatgtgtctcacgaggaccctgaagtgaagttcaattggtacgtggacggcgtggaagtgcacaacgccaagaccaagcctagagaggaacagtacaacagcacctacagagtggtgtccgtgctgaccgtgctgcaccaggattggctgaacggcaaagagtacaagtgcaaggtgtccaacaaggccctgcctctgcctgaggaaaagaccatcagcaaggccaagggccagcctagggaaccccaggtttacacactgcctccaagccgcgacgaactgaccaagaaccaggtgtccctgacctgcctcgtgaagggcttctacccttccgatatcgccgtggaatgggagagcaatggccagcctgagaacaactacaagacaacccctcctgtgctggacagcgacggctcattcttcctgtacagcaagctgaccgtggacaagtccagatggcagcagggcaacgtgttcagctgtagcgtgctgcacgaagccctgcacagccactacacccagaaaagcctgtctctgagccccggcaaatgataa

SEQ ID NO: 244 - RNA, 1446 nt, synthetic construct
  source 1..1446: mol_type = other RNA
atggattggatttggagaatcctgttcctcgtgggcgccgctaccggagcccactcccagggcagactgtttcagtctggcgccgaagtgaaaagaccaggcgcctctgtgcggatcagctgcagagctgacgacgacccctacaccgacgacgataccttcaccaagtactggacccactggatcagacaggcccctggacaaagacctgagtggctgggagtgatcagccctcacttcgccagacctatctacagctacaagttccgggacagactgaccctgaccagagacagctctctgaccgccgtgtacctggaactgaagggcctgcagcctgacgacagcggcatctacttttgcgccagagatcccttcggcgacagagcccctcactacaactaccacatggacgtgtggggcggaggcacagccgtgatagttagcagcgcttccacaaagggccctagcgtgttccctctggctcctagcagcaagtctacaagcggaggaacagctgccctgggctgcctggtggaagattactttcctgagcctgtgaccgtgtcctggaacagcggtgctctgacttctggcgtgcacacctttccagccgtgctgcaaagcagcggcctgtactctctgagcagcgtggtcacagtgccaagctctagcctgggcacccagacctacatctgcaatgtgaaccacaagcctagcaacaccaaggtggacgacaaggtggaacccaagagctgcgacaagacccacacctgtcctccatgtcctgctccagaactgctggccggaccttccgtgttcctgtttcctccaaagcctaaggacaccctgatgatcagcagaacccctgaagtgacctgcgtggtggtggatgtgtctcacgaggaccctgaagtgaagttcaattggtacgtggacggcgtggaagtgcacaacgccaagaccaagcctagagaggaacagtacaacagcacctacagagtggtgtccgtgctgaccgtgctgcaccaggattggctgaacggcaaagagtacaagtgcaaggtgtccaacaaggccctgcctgcccctgaggaaaagaccatcagcaaggccaagggccagcctagggaaccccaggtttacacactgcctccaagccgcgacgaactgaccaagaaccaggtgtccctgacctgcctcgtgaagggcttctacccttccgatatcgccgtggaatgggagagcaatggccagcctgagaacaactacaagacaacccctcctgtgctggacagcgacggctcattcttcctgtacagcaagctgaccgtggacaagtccagatggcagcagggcaacgtgttcagctgtagcgtgctgcacgaagccctgcacagccactacacccagaaaagcctgtctctgagccccggcaaatgataa

SEQ ID NO: 245 - RNA, 1446 nt, synthetic construct
  source 1..1446: mol_type = other RNA
atggattggatttggagaatcctgttcctcgtgggcgccgctaccggagcccactcccagggcagactgtttcagtctggcgccgaagtgaaaagaccaggcgcctctgtgcggatcagctgcagagctgacgacgacccctacaccgacgacgataccttcaccaagtactggacccactggatcagacaggcccctggacaaagacctgagtggctgggagtgatcagccctcacttcgccagacctatctacagctacaagttccgggacagactgaccctgaccagagacagctctctgaccgccgtgtacctggaactgaagggcctgcagcctgacgacagcggcatctacttttgcgccagagatcccttcggcgacagagcccctcactacaactaccacatggacgtgtggggcggaggcacagccgtgatagttagcagcgcttccacaaagggccctagcgtgttccctctggctcctagcagcaagtctacaagcggaggaacagctgccctgggctgcctggtggaagattactttcctgagcctgtgaccgtgtcctggaacagcggtgctctgacttctggcgtgcacacctttccagccgtgctgcaaagcagcggcctgtactctctgagcagcgtggtcacagtgccaagctctagcctgggcacccagacctacatctgcaatgtgaaccacaagcctagcaacaccaaggtggacgacaaggtggaacccaagagctgcgacaagacccacacctgtcctccatgtcctgctccagaactgctggccggaccttccgtgttcctgtttcctccaaagcctaaggacaccctgatgatcagcagaacccctgaagtgacctgcgtggtggtggatgtgtctcacgaggaccctgaagtgaagttcaattggtacgtggacggcgtggaagtgcacaacgccaagaccaagcctagagaggaacagtacaacagcacctacagagtggtgtccgtgctgaccgtgctgcaccaggattggctgaacggcaaagagtacaagtgcaaggtgtccaacaaggccctgcctgcccctatcgaaaagaccatcagcaaggccaagggccagcctagggaaccccaggtttacacactgcctccaagccgcgacgaactgaccaagaaccaggtgtccctgacctgcctcgtgaagggcttctacccttccgatatcgccgtggaatgggagagcaatggccagcctgagaacaactacaagacaacccctcctgtgctggacagcgacggctcattcttcctgtacagcaagctgaccgtggacaagtccagatggcagcagggcaacgtgttcagctgtagcgtgctgcacgaagccctgcacagccactacacccagaaaagcctgtctctgagccccggcaaatgataa

SEQ ID NO: 246 - RNA, 1446 nt, synthetic construct
  source 1..1446: mol_type = other RNA
atggattggatttggagaatcctgttcctcgtgggcgccgctaccggagcccactcccagggcagactgtttcagtctggcgccgaagtgaaaagaccaggcgcctctgtgcggatcagctgcagagctgacgacgacccctacaccgacgacgataccttcaccaagtactggacccactggatcagacaggcccctggacaaagacctgagtggctgggagtgatcagccctcacttcgccagacctatctacagctacaagttccgggacagactgaccctgaccagagacagctctctgaccgccgtgtacctggaactgaagggcctgcagcctgacgacagcggcatctacttttgcgccagagatcccttcggcgacagagcccctcactacaactaccacatggacgtgtggggcggaggcacagccgtgatagttagcagcgcttccacaaagggccctagcgtgttccctctggctcctagcagcaagtctacaagcggaggaacagctgccctgggctgcctggtggaagattactttcctgagcctgtgaccgtgtcctggaacagcggtgctctgacttctggcgtgcacacctttccagccgtgctgcaaagcagcggcctgtactctctgagcagcgtggtcacagtgccaagctctagcctgggcacccagacctacatctgcaatgtgaaccacaagcctagcaacaccaaggtggacgacaaggtggaacccaagagctgcgacaagacccacacctgtcctccatgtcctgctccagaactgctgggcggaccttccgtgttcctgtttcctccaaagcctaaggacaccctgatgatcagcagaacccctgaagtgacctgcgtggtggtggatgtgtctcacgaggaccctgaagtgaagttcaattggtacgtggacggcgtggaagtgcacaacgccaagaccaagcctagagaggaacagtacaacagcacctacagagtggtgtccgtgctgaccgtgctgcaccaggattggctgaacggcaaagagtacaagtgcaaggtgtccaacaaggccctgcctgcccctgaggaaaagaccatcagcaaggccaagggccagcctagggaaccccaggtttacacactgcctccaagccgcgacgaactgaccaagaaccaggtgtccctgacctgcctcgtgaagggcttctacccttccgatatcgccgtggaatgggagagcaatggccagcctgagaacaactacaagacaacccctcctgtgctggacagcgacggctcattcttcctgtacagcaagctgaccgtggacaagtccagatggcagcagggcaacgtgttcagctgtagcgtgctgcacgaagccctgcacagccactacacccagaaaagcctgtctctgagccccggcaaatgataa

SEQ ID NO: 247 - RNA, 1446 nt, synthetic construct
  source 1..1446: mol_type = other RNA
atggattggatttggagaatcctgttcctcgtgggcgccgctaccggagcccactcccagggcagactgtttcagtctggcgccgaagtgaaaagaccaggcgcctctgtgcggatcagctgcagagctgacgacgacccctacaccgacgacgataccttcaccaagtactggacccactggatcagacaggcccctggacaaagacctgagtggctgggagtgatcagccctcacttcgccagacctatctacagctacaagttccgggacagactgaccctgaccagagacagctctctgaccgccgtgtacctggaactgaagggcctgcagcctgacgacagcggcatctacttttgcgccagagatcccttcggcgacagagcccctcactacaactaccacatggacgtgtggggcggaggcacagccgtgatagttagcagcgcttccacaaagggccctagcgtgttccctctggctcctagcagcaagtctacaagcggaggaacagctgccctgggctgcctggtggaagattactttcctgagcctgtgaccgtgtcctggaacagcggtgctctgacttctggcgtgcacacctttccagccgtgctgcaaagcagcggcctgtactctctgagcagcgtggtcacagtgccaagctctagcctgggcacccagacctacatctgcaatgtgaaccacaagcctagcaacaccaaggtggacgacaaggtggaacccaagagctgcgacaagacccacacctgtcctccatgtcctgctccagaactgctcggcggaccttccgtgttcctgtttcctccaaagcctaaggacaccctgatgatcagcagaacccctgaagtgacctgcgtggtggtggatgtgtctcacgaggacccagaagtgaagttcaattggtacgtggacggcgtggaagtgcacaacgccaagaccaagcctagagaggaacagtacaacagcacctacagagtggtgtccgtgctgacagtgctgcaccaggattggctgaacggcaaagagtacaagtgcaaggtgtccaacaaggccctgcctgctcctatcgagaaaaccatcagcaaggccaagggccagcctcgcgaacctcaagtctgtacactgcctcctagccgcgacgaactgaccaagaaccaggtgtccctgagctgcgccgtgaagggcttttacccttccgatatcgccgtggaatgggagagcaatggccagcctgagaacaactacaagacaacccctcctgtgctggacagcgacggctcattcttcctggtgtccaagctgacagtggacaagagcagatggcagcagggcaacgtgttcagctgcagcgtgctgcatgaagccctgcacagccactacacccagaagtccctgtctctgagccccggcaagtgataa

SEQ ID NO: 248 - RNA, 1446 nt, synthetic construct
  source 1..1446: mol_type = other RNA
atggattggatttggagaatcctgttcctcgtgggcgccgctaccggagcccactcccagggcagactgtttcagtctggcgccgaagtgaaaagaccaggcgcctctgtgcggatcagctgcagagctgacgacgacccctacaccgacgacgataccttcaccaagtactggacccactggatcagacaggcccctggacaaagacctgagtggctgggagtgatcagccctcacttcgccagacctatctacagctacaagttccgggacagactgaccctgaccagagacagctctctgaccgccgtgtacctggaactgaagggcctgcagcctgacgacagcggcatctacttttgcgccagagatcccttcggcgacagagcccctcactacaactaccacatggacgtgtggggcggaggcacagccgtgatagttagcagcgcttccacaaagggccctagcgtgttccctctggctcctagcagcaagtctacaagcggaggaacagctgccctgggctgcctggtggaagattactttcctgagcctgtgaccgtgtcctggaacagcggtgctctgacttctggcgtgcacacctttccagccgtgctgcaaagcagcggcctgtactctctgagcagcgtggtcacagtgccaagctctagcctgggcacccagacctacatctgcaatgtgaaccacaagcctagcaacaccaaggtggacgacaaggtggaacccaagagctgcgacaagacccacacctgtcctccatgtcctgctccagaactgctggccggaccttccgtgttcctgtttcctccaaagcctaaggacaccctgatgatcagcagaacccctgaagtgacctgcgtggtggtggatgtgtctcacgaggaccctgaagtgaagttcaattggtacgtggacggcgtggaagtgcacaacgccaagaccaagcctagagaggaacagtacaacagcacctacagagtggtgtccgtgctgaccgtgctgcaccaggattggctgaacggcaaagagtacaagtgcaaggtgtccaacaaggccctgcctctgcctgaggaaaagaccatcagcaaggccaagggccagcctcgcgaacctcaagtctgtacactgcctcctagccgcgacgaactgaccaagaaccaggtgtccctgagctgcgccgtgaagggcttttacccttccgatatcgccgtggaatgggagagcaatggccagcctgagaacaactacaagacaacccctcctgtgctggacagcgacggctcattcttcctggtgtccaagctgacagtggacaagagcagatggcagcagggcaacgtgttcagctgcagcgtgctgcatgaagccctgcacagccactacacccagaagtccctgtctctgagccccggcaagtgataa

SEQ ID NO: 249 - RNA, 1446 nt, synthetic construct
  source 1..1446: mol_type = other RNA
atggattggatttggagaatcctgttcctcgtgggcgccgctaccggagcccactcccagggcagactgtttcagtctggcgccgaagtgaaaagaccaggcgcctctgtgcggatcagctgcagagctgacgacgacccctacaccgacgacgataccttcaccaagtactggacccactggatcagacaggcccctggacaaagacctgagtggctgggagtgatcagccctcacttcgccagacctatctacagctacaagttccgggacagactgaccctgaccagagacagctctctgaccgccgtgtacctggaactgaagggcctgcagcctgacgacagcggcatctacttttgcgccagagatcccttcggcgacagagcccctcactacaactaccacatggacgtgtggggcggaggcacagccgtgatagttagcagcgcttccacaaagggccctagcgtgttccctctggctcctagcagcaagtctacaagcggaggaacagctgccctgggctgcctggtggaagattactttcctgagcctgtgaccgtgtcctggaacagcggtgctctgacttctggcgtgcacacctttccagccgtgctgcaaagcagcggcctgtactctctgagcagcgtggtcacagtgccaagctctagcctgggcacccagacctacatctgcaatgtgaaccacaagcctagcaacaccaaggtggacgacaaggtggaacccaagagctgcgacaagacccacacctgtcctccatgtcctgctccagaactgctggccggaccttccgtgttcctgtttcctccaaagcctaaggacaccctgatgatcagcagaacccctgaagtgacctgcgtggtggtggatgtgtctcacgaggaccctgaagtgaagttcaattggtacgtggacggcgtggaagtgcacaacgccaagaccaagcctagagaggaacagtacaacagcacctacagagtggtgtccgtgctgaccgtgctgcaccaggattggctgaacggcaaagagtacaagtgcaaggtgtccaacaaggccctgcctgcccctgaggaaaagaccatcagcaaggccaagggccagcctcgcgaacctcaagtctgtacactgcctcctagccgcgacgaactgaccaagaaccaggtgtccctgagctgcgccgtgaagggcttttacccttccgatatcgccgtggaatgggagagcaatggccagcctgagaacaactacaagacaacccctcctgtgctggacagcgacggctcattcttcctggtgtccaagctgacagtggacaagagcagatggcagcagggcaacgtgttcagctgcagcgtgctgcatgaagccctgcacagccactacacccagaagtccctgtctctgagccccggcaagtgataa

SEQ ID NO: 250 - RNA, 1446 nt, synthetic construct
  source 1..1446: mol_type = other RNA
atggattggatttggagaatcctgttcctcgtgggcgccgctaccggagcccactcccagggcagactgtttcagtctggcgccgaagtgaaaagaccaggcgcctctgtgcggatcagctgcagagctgacgacgacccctacaccgacgacgataccttcaccaagtactggacccactggatcagacaggcccctggacaaagacctgagtggctgggagtgatcagccctcacttcgccagacctatctacagctacaagttccgggacagactgaccctgaccagagacagctctctgaccgccgtgtacctggaactgaagggcctgcagcctgacgacagcggcatctacttttgcgccagagatcccttcggcgacagagcccctcactacaactaccacatggacgtgtggggcggaggcacagccgtgatagttagcagcgcttccacaaagggccctagcgtgttccctctggctcctagcagcaagtctacaagcggaggaacagctgccctgggctgcctggtggaagattactttcctgagcctgtgaccgtgtcctggaacagcggtgctctgacttctggcgtgcacacctttccagccgtgctgcaaagcagcggcctgtactctctgagcagcgtggtcacagtgccaagctctagcctgggcacccagacctacatctgcaatgtgaaccacaagcctagcaacaccaaggtggacgacaaggtggaacccaagagctgcgacaagacccacacctgtcctccatgtcctgctccagaactgctggccggaccttccgtgttcctgtttcctccaaagcctaaggacaccctgatgatcagcagaacccctgaagtgacctgcgtggtggtggatgtgtctcacgaggaccctgaagtgaagttcaattggtacgtggacggcgtggaagtgcacaacgccaagaccaagcctagagaggaacagtacaacagcacctacagagtggtgtccgtgctgaccgtgctgcaccaggattggctgaacggcaaagagtacaagtgcaaggtgtccaacaaggccctgcctgcccctatcgaaaagaccatcagcaaggccaagggccagcctcgcgaacctcaagtctgtacactgcctcctagccgcgacgaactgaccaagaaccaggtgtccctgagctgcgccgtgaagggcttttacccttccgatatcgccgtggaatgggagagcaatggccagcctgagaacaactacaagacaacccctcctgtgctggacagcgacggctcattcttcctggtgtccaagctgacagtggacaagagcagatggcagcagggcaacgtgttcagctgcagcgtgctgcatgaagccctgcacagccactacacccagaagtccctgtctctgagccccggcaagtgataa

SEQ ID NO: 251 - RNA, 1446 nt, synthetic construct
  source 1..1446: mol_type = other RNA
atggattggatttggagaatcctgttcctcgtgggcgccgctaccggagcccactcccagggcagactgtttcagtctggcgccgaagtgaaaagaccaggcgcctctgtgcggatcagctgcagagctgacgacgacccctacaccgacgacgataccttcaccaagtactggacccactggatcagacaggcccctggacaaagacctgagtggctgggagtgatcagccctcacttcgccagacctatctacagctacaagttccgggacagactgaccctgaccagagacagctctctgaccgccgtgtacctggaactgaagggcctgcagcctgacgacagcggcatctacttttgcgccagagatcccttcggcgacagagcccctcactacaactaccacatggacgtgtggggcggaggcacagccgtgatagttagcagcgcttccacaaagggccctagcgtgttccctctggctcctagcagcaagtctacaagcggaggaacagctgccctgggctgcctggtggaagattactttcctgagcctgtgaccgtgtcctggaacagcggtgctctgacttctggcgtgcacacctttccagccgtgctgcaaagcagcggcctgtactctctgagcagcgtggtcacagtgccaagctctagcctgggcacccagacctacatctgcaatgtgaaccacaagcctagcaacaccaaggtggacgacaaggtggaacccaagagctgcgacaagacccacacctgtcctccatgtcctgctccagaactgctgggcggaccttccgtgttcctgtttcctccaaagcctaaggacaccctgatgatcagcagaacccctgaagtgacctgcgtggtggtggatgtgtctcacgaggaccctgaagtgaagttcaattggtacgtggacggcgtggaagtgcacaacgccaagaccaagcctagagaggaacagtacaacagcacctacagagtggtgtccgtgctgaccgtgctgcaccaggattggctgaacggcaaagagtacaagtgcaaggtgtccaacaaggccctgcctgcccctgaggaaaagaccatcagcaaggccaagggccagcctcgcgaacctcaagtctgtacactgcctcctagccgcgacgaactgaccaagaaccaggtgtccctgagctgcgccgtgaagggcttttacccttccgatatcgccgtggaatgggagagcaatggccagcctgagaacaactacaagacaacccctcctgtgctggacagcgacggctcattcttcctggtgtccaagctgacagtggacaagagcagatggcagcagggcaacgtgttcagctgcagcgtgctgcatgaagccctgcacagccactacacccagaagtccctgtctctgagccccggcaagtgataa

SEQ ID NO: 252 - RNA, 1446 nt, synthetic construct
  source 1..1446: mol_type = other RNA
atggattggatttggagaatcctgttcctcgtgggcgccgctaccggagcccactcccagggcagactgtttcagtctggcgccgaagtgaaaagaccaggcgcctctgtgcggatcagctgcagagctgacgacgacccctacaccgacgacgataccttcaccaagtactggacccactggatcagacaggcccctggacaaagacctgagtggctgggagtgatcagccctcacttcgccagacctatctacagctacaagttccgggacagactgaccctgaccagagacagctctctgaccgccgtgtacctggaactgaagggcctgcagcctgacgacagcggcatctacttttgcgccagagatcccttcggcgacagagcccctcactacaactaccacatggacgtgtggggcggaggcacagccgtgatagttagcagcgcttccacaaagggccctagcgtgttccctctggctcctagcagcaagtctacaagcggaggaacagctgccctgggctgcctggtggaagattactttcctgagcctgtgaccgtgtcctggaacagcggtgctctgacttctggcgtgcacacctttccagccgtgctgcaaagcagcggcctgtactctctgagcagcgtggtcacagtgccaagctctagcctgggcacccagacctacatctgcaatgtgaaccacaagcctagcaacaccaaggtggacgacaaggtggaacccaagagctgcgacaagacccacacctgtcctccatgtcctgctccagaactgctcggcggaccttccgtgttcctgtttcctccaaagcctaaggacaccctgatgatcagcagaacccctgaagtgacctgcgtggtggtggatgtgtctcacgaggacccagaagtgaagttcaattggtacgtggacggcgtggaagtgcacaacgccaagaccaagcctagagaggaacagtacaacagcacctacagagtggtgtccgtgctgacagtgctgcaccaggattggctgaacggcaaagagtacaagtgcaaggtgtccaacaaggccctgcctgctcctatcgagaaaaccatcagcaaggccaagggccagcctagggaaccccaggtttacaccctgcctccatgccgcgacgaactgaccaagaaccaggtgtccctgtggtgcctggtcaagggcttctacccttccgatatcgccgtggaatgggagagcaatggccagcctgagaacaactacaagacaacccctcctgtgctggacagcgacggctcattcttcctgtacagcaagctgacagtggacaagagcagatggcagcagggcaacgtgttcagctgcagcgtgctgcatgaagccctgcacagccactacacccagaagtccctgtctctgagccccggcaagtgataa

SEQ ID NO: 253 - RNA, 1446 nt, synthetic construct
  source 1..1446: mol_type = other RNA
atggattggatttggagaatcctgttcctcgtgggcgccgctaccggagcccactcccagggcagactgtttcagtctggcgccgaagtgaaaagaccaggcgcctctgtgcggatcagctgcagagctgacgacgacccctacaccgacgacgataccttcaccaagtactggacccactggatcagacaggcccctggacaaagacctgagtggctgggagtgatcagccctcacttcgccagacctatctacagctacaagttccgggacagactgaccctgaccagagacagctctctgaccgccgtgtacctggaactgaagggcctgcagcctgacgacagcggcatctacttttgcgccagagatcccttcggcgacagagcccctcactacaactaccacatggacgtgtggggcggaggcacagccgtgatagttagcagcgcttccacaaagggccctagcgtgttccctctggctcctagcagcaagtctacaagcggaggaacagctgccctgggctgcctggtggaagattactttcctgagcctgtgaccgtgtcctggaacagcggtgctctgacttctggcgtgcacacctttccagccgtgctgcaaagcagcggcctgtactctctgagcagcgtggtcacagtgccaagctctagcctgggcacccagacctacatctgcaatgtgaaccacaagcctagcaacaccaaggtggacgacaaggtggaacccaagagctgcgacaagacccacacctgtcctccatgtcctgctccagaactgctggccggaccttccgtgttcctgtttcctccaaagcctaaggacaccctgatgatcagcagaacccctgaagtgacctgcgtggtggtggatgtgtctcacgaggaccctgaagtgaagttcaattggtacgtggacggcgtggaagtgcacaacgccaagaccaagcctagagaggaacagtacaacagcacctacagagtggtgtccgtgctgaccgtgctgcaccaggattggctgaacggcaaagagtacaagtgcaaggtgtccaacaaggccctgcctctgcctgaggaaaagaccatcagcaaggccaagggccagcctagggaaccccaggtttacaccctgcctccatgccgcgacgaactgaccaagaaccaggtgtccctgtggtgcctggtcaagggcttctacccttccgatatcgccgtggaatgggagagcaatggccagcctgagaacaactacaagacaacccctcctgtgctggacagcgacggctcattcttcctgtacagcaagctgacagtggacaagagcagatggcagcagggcaacgtgttcagctgcagcgtgctgcatgaagccctgcacagccactacacccagaagtccctgtctctgagccccggcaagtgataa

SEQ ID NO: 254 - RNA, 1446 nt, synthetic construct
  source 1..1446: mol_type = other RNA
atggattggatttggagaatcctgttcctcgtgggcgccgctaccggagcccactcccagggcagactgtttcagtctggcgccgaagtgaaaagaccaggcgcctctgtgcggatcagctgcagagctgacgacgacccctacaccgacgacgataccttcaccaagtactggacccactggatcagacaggcccctggacaaagacctgagtggctgggagtgatcagccctcacttcgccagacctatctacagctacaagttccgggacagactgaccctgaccagagacagctctctgaccgccgtgtacctggaactgaagggcctgcagcctgacgacagcggcatctacttttgcgccagagatcccttcggcgacagagcccctcactacaactaccacatggacgtgtggggcggaggcacagccgtgatagttagcagcgcttccacaaagggccctagcgtgttccctctggctcctagcagcaagtctacaagcggaggaacagctgccctgggctgcctggtggaagattactttcctgagcctgtgaccgtgtcctggaacagcggtgctctgacttctggcgtgcacacctttccagccgtgctgcaaagcagcggcctgtactctctgagcagcgtggtcacagtgccaagctctagcctgggcacccagacctacatctgcaatgtgaaccacaagcctagcaacaccaaggtggacgacaaggtggaacccaagagctgcgacaagacccacacctgtcctccatgtcctgctccagaactgctggccggaccttccgtgttcctgtttcctccaaagcctaaggacaccctgatgatcagcagaacccctgaagtgacctgcgtggtggtggatgtgtctcacgaggaccctgaagtgaagttcaattggtacgtggacggcgtggaagtgcacaacgccaagaccaagcctagagaggaacagtacaacagcacctacagagtggtgtccgtgctgaccgtgctgcaccaggattggctgaacggcaaagagtacaagtgcaaggtgtccaacaaggccctgcctgcccctgaggaaaagaccatcagcaaggccaagggccagcctagggaaccccaggtttacaccctgcctccatgccgcgacgaactgaccaagaaccaggtgtccctgtggtgcctggtcaagggcttctacccttccgatatcgccgtggaatgggagagcaatggccagcctgagaacaactacaagacaacccctcctgtgctggacagcgacggctcattcttcctgtacagcaagctgacagtggacaagagcagatggcagcagggcaacgtgttcagctgcagcgtgctgcatgaagccctgcacagccactacacccagaagtccctgtctctgagccccggcaagtgataa

SEQ ID NO: 255 - RNA, 1446 nt, synthetic construct
  source 1..1446: mol_type = other RNA
atggattggatttggagaatcctgttcctcgtgggcgccgctaccggagcccactcccagggcagactgtttcagtctggcgccgaagtgaaaagaccaggcgcctctgtgcggatcagctgcagagctgacgacgacccctacaccgacgacgataccttcaccaagtactggacccactggatcagacaggcccctggacaaagacctgagtggctgggagtgatcagccctcacttcgccagacctatctacagctacaagttccgggacagactgaccctgaccagagacagctctctgaccgccgtgtacctggaactgaagggcctgcagcctgacgacagcggcatctacttttgcgccagagatcccttcggcgacagagcccctcactacaactaccacatggacgtgtggggcggaggcacagccgtgatagttagcagcgcttccacaaagggccctagcgtgttccctctggctcctagcagcaagtctacaagcggaggaacagctgccctgggctgcctggtggaagattactttcctgagcctgtgaccgtgtcctggaacagcggtgctctgacttctggcgtgcacacctttccagccgtgctgcaaagcagcggcctgtactctctgagcagcgtggtcacagtgccaagctctagcctgggcacccagacctacatctgcaatgtgaaccacaagcctagcaacaccaaggtggacgacaaggtggaacccaagagctgcgacaagacccacacctgtcctccatgtcctgctccagaactgctggccggaccttccgtgttcctgtttcctccaaagcctaaggacaccctgatgatcagcagaacccctgaagtgacctgcgtggtggtggatgtgtctcacgaggaccctgaagtgaagttcaattggtacgtggacggcgtggaagtgcacaacgccaagaccaagcctagagaggaacagtacaacagcacctacagagtggtgtccgtgctgaccgtgctgcaccaggattggctgaacggcaaagagtacaagtgcaaggtgtccaacaaggccctgcctgcccctatcgaaaagaccatcagcaaggccaagggccagcctagggaaccccaggtttacaccctgcctccatgccgcgacgaactgaccaagaaccaggtgtccctgtggtgcctggtcaagggcttctacccttccgatatcgccgtggaatgggagagcaatggccagcctgagaacaactacaagacaacccctcctgtgctggacagcgacggctcattcttcctgtacagcaagctgacagtggacaagagcagatggcagcagggcaacgtgttcagctgcagcgtgctgcatgaagccctgcacagccactacacccagaagtccctgtctctgagccccggcaagtgataa

SEQ ID NO: 256 - RNA, 1446 nt, synthetic construct
  source 1..1446: mol_type = other RNA
atggattggatttggagaatcctgttcctcgtgggcgccgctaccggagcccactcccagggcagactgtttcagtctggcgccgaagtgaaaagaccaggcgcctctgtgcggatcagctgcagagctgacgacgacccctacaccgacgacgataccttcaccaagtactggacccactggatcagacaggcccctggacaaagacctgagtggctgggagtgatcagccctcacttcgccagacctatctacagctacaagttccgggacagactgaccctgaccagagacagctctctgaccgccgtgtacctggaactgaagggcctgcagcctgacgacagcggcatctacttttgcgccagagatcccttcggcgacagagcccctcactacaactaccacatggacgtgtggggcggaggcacagccgtgatagttagcagcgcttccacaaagggccctagcgtgttccctctggctcctagcagcaagtctacaagcggaggaacagctgccctgggctgcctggtggaagattactttcctgagcctgtgaccgtgtcctggaacagcggtgctctgacttctggcgtgcacacctttccagccgtgctgcaaagcagcggcctgtactctctgagcagcgtggtcacagtgccaagctctagcctgggcacccagacctacatctgcaatgtgaaccacaagcctagcaacaccaaggtggacgacaaggtggaacccaagagctgcgacaagacccacacctgtcctccatgtcctgctccagaactgctgggcggaccttccgtgttcctgtttcctccaaagcctaaggacaccctgatgatcagcagaacccctgaagtgacctgcgtggtggtggatgtgtctcacgaggaccctgaagtgaagttcaattggtacgtggacggcgtggaagtgcacaacgccaagaccaagcctagagaggaacagtacaacagcacctacagagtggtgtccgtgctgaccgtgctgcaccaggattggctgaacggcaaagagtacaagtgcaaggtgtccaacaaggccctgcctgcccctgaggaaaagaccatcagcaaggccaagggccagcctagggaaccccaggtttacaccctgcctccatgccgcgacgaactgaccaagaaccaggtgtccctgtggtgcctggtcaagggcttctacccttccgatatcgccgtggaatgggagagcaatggccagcctgagaacaactacaagacaacccctcctgtgctggacagcgacggctcattcttcctgtacagcaagctgacagtggacaagagcagatggcagcagggcaacgtgttcagctgcagcgtgctgcatgaagccctgcacagccactacacccagaagtccctgtctctgagccccggcaagtgataa

SEQ ID NO: 257 - RNA, 1596 nt, synthetic construct
  source 1..1596: mol_type = other RNA
atggattggatttggagaatcctgttcctcgtgggcgccgctaccggagcccactcccaaggcagactgtttcagtctggcgccgaagtgaaaagaccaggcgcctctgtgcggatcagctgcagagctgacgacgacccctacaccgacgacgataccttcaccaagtactggacccactggatcagacaggcccctggacaaagacctgagtggctgggagtgatcagccctcacttcgccagacctatctacagctacaagttccgggacagactgaccctgaccagagacagctctctgaccgccgtgtacctggaactgaagggcctgcagcctgacgacagcggcatctacttttgcgccagagatcccttcggcgacagagcccctcactacaactaccacatggacgtgtggggcggaggcacagccgtgatagtgtcttccggcggaggtggaagtggtggtggcggtagcggaggcggtgggtccggaggtggtggatctgaagttgtgctgacacagagccctgccatcctgagtgtgtccccaggcgatagagtgatcctgtcctgcagagcctctcagggcctcgattcttctcacctggcctggtacagattcaagcggggacagatccccacactggtcatcttcggcaccagcaacagagccagaggcacccctgatagattttccggctctggcagcggagccgacttcaccctgacaatcagcagagtggaacccgaggacttcgccacctactactgccagagatacggcggcacccctatcacatttggcggcggaaccacactggacaagaaaggcggaggtggaagtggtggtggcggtagcggaggcggtgggtccggaggtggtggatctgaacctaagagcagcgacaagacccacacctgtcctccatgtcctgctccagaactgctcggcggaccttccgtgttcctgtttcctccaaagcctaaggacaccctgatgatcagcagaacccctgaagtgacctgcgtggtggtggatgtgtctcacgaggacccagaagtgaagttcaattggtacgtggacggcgtggaagtgcacaacgccaagaccaagcctagagaggaacagtacaacagcacctacagagtggtgtccgtgctgacagtgctgcaccaggattggctgaacggcaaagagtacaagtgcaaggtgtccaacaaggccctgcctgctcctatcgagaaaaccatcagcaaggccaagggccagcctagggaaccccaggtttacacactgcctccaagccgcgaggaaatgaccaagaaccaggtgtccctgacctgcctcgtgaagggcttctacccttccgatatcgccgtggaatgggagagcaatggccagcctgagaacaactacaagacaacccctcctgtgctggacagcgacggctcattcttcctgtacagcaagctgactgtggataagtcccggtggcagcagggcaacgtgttcagctgttctgtgatgcacgaagccctgcacaaccactacacccagaaaagcctgtctctgagccccggcaagtgataa

SEQ ID NO: 258 - RNA, 1596 nt, synthetic construct
  source 1..1596: mol_type = other RNA
atggattggatttggagaatcctgttcctcgtgggcgccgctaccggagcccactcccaaggcagactgtttcagtctggcgccgaagtgaaaagaccaggcgcctctgtgcggatcagctgcagagctgacgacgacccctacaccgacgacgataccttcaccaagtactggacccactggatcagacaggcccctggacaaagacctgagtggctgggagtgatcagccctcacttcgccagacctatctacagctacaagttccgggacagactgaccctgaccagagacagctctctgaccgccgtgtacctggaactgaagggcctgcagcctgacgacagcggcatctacttttgcgccagagatcccttcggcgacagagcccctcactacaactaccacatggacgtgtggggcggaggcacagccgtgatagtgtcttccggcggaggtggaagtggtggtggcggtagcggaggcggtgggtccggaggtggtggatctgaagttgtgctgacacagagccctgccatcctgagtgtgtccccaggcgatagagtgatcctgtcctgcagagcctctcagggcctcgattcttctcacctggcctggtacagattcaagcggggacagatccccacactggtcatcttcggcaccagcaacagagccagaggcacccctgatagattttccggctctggcagcggagccgacttcaccctgacaatcagcagagtggaacccgaggacttcgccacctactactgccagagatacggcggcacccctatcacatttggcggcggaaccacactggacaagaaaggcggaggtggaagtggtggtggcggtagcggaggcggtgggtccggaggtggtggatctgaacctaagagcagcgacaagacccacacctgtcctccatgtcctgctccagaactgctcggcggaccttccgtgttcctgtttcctccaaagcctaaggacaccctgatgatcagcagaacccctgaagtgacctgcgtggtggtggatgtgtctcacgaggacccagaagtgaagttcaattggtacgtggacggcgtggaagtgcacaacgccaagaccaagcctagagaggaacagtacaacagcacctacagagtggtgtccgtgctgacagtgctgcaccaggattggctgaacggcaaagagtacaagtgcaaggtgtccaacaaggccctgcctgctcctatcgagaaaaccatcagcaaggccaagggccagcctagggaaccccaggtttacacactgcctccaagccgcgaggaaatgaccaagaaccaggtgtccctgacctgcctcgtgaagggcttctacccttccgatatcgccgtggaatgggagagcaatggccagcctgagaacaactacaagacaacccctcctgtgctggacagcgacggctcattcttcctgtacagcaagctgaccgtggacaagtccagatggcagcagggcaacgtgttcagctgtagcgtgctgcacgaagccctgcacagccactacacccagaaaagcctgtctctgagccccggcaaatgataa

SEQ ID NO: 259 - RNA, 1596 nt, synthetic construct
  source 1..1596: mol_type = other RNA
atggattggatttggagaatcctgttcctcgtgggcgccgctaccggagcccactcccaaggcagactgtttcagtctggcgccgaagtgaaaagaccaggcgcctctgtgcggatcagctgcagagctgacgacgacccctacaccgacgacgataccttcaccaagtactggacccactggatcagacaggcccctggacaaagacctgagtggctgggagtgatcagccctcacttcgccagacctatctacagctacaagttccgggacagactgaccctgaccagagacagctctctgaccgccgtgtacctggaactgaagggcctgcagcctgacgacagcggcatctacttttgcgccagagatcccttcggcgacagagcccctcactacaactaccacatggacgtgtggggcggaggcacagccgtgatagtgtcttccggcggaggtggaagtggtggtggcggtagcggaggcggtgggtccggaggtggtggatctgaagttgtgctgacacagagccctgccatcctgagtgtgtccccaggcgatagagtgatcctgtcctgcagagcctctcagggcctcgattcttctcacctggcctggtacagattcaagcggggacagatccccacactggtcatcttcggcaccagcaacagagccagaggcacccctgatagattttccggctctggcagcggagccgacttcaccctgacaatcagcagagtggaacccgaggacttcgccacctactactgccagagatacggcggcacccctatcacatttggcggcggaaccacactggacaagaaaggcggaggtggaagtggtggtggcggtagcggaggcggtgggtccggaggtggtggatctgaacctaagagcagcgacaagacccacacctgtcctccatgtcctgctccagaactgctggccggaccttccgtgttcctgtttcctccaaagcctaaggacaccctgatgatcagcagaacccctgaagtgacctgcgtggtggtggatgtgtctcacgaggaccctgaagtgaagttcaattggtacgtggacggcgtggaagtgcacaacgccaagaccaagcctagagaggaacagtacaacagcacctacagagtggtgtccgtgctgaccgtgctgcaccaggattggctgaacggcaaagagtacaagtgcaaggtgtccaacaaggccctgcctctgcctgaggaaaagaccatcagcaaggccaagggccagcctagggaaccccaggtttacacactgcctccaagccgcgaggaaatgaccaagaaccaggtgtccctgacctgcctcgtgaagggcttctacccttccgatatcgccgtggaatgggagagcaatggccagcctgagaacaactacaagacaacccctcctgtgctggacagcgacggctcattcttcctgtacagcaagctgaccgtggacaagtccagatggcagcagggcaacgtgttcagctgtagcgtgctgcacgaagccctgcacagccactacacccagaaaagcctgtctctgagccccggcaaatgataa

SEQ ID NO: 260 - RNA, 1596 nt, synthetic construct
  source 1..1596: mol_type = other RNA
atggattggatttggagaatcctgttcctcgtgggcgccgctaccggagcccactcccaaggcagactgtttcagtctggcgccgaagtgaaaagaccaggcgcctctgtgcggatcagctgcagagctgacgacgacccctacaccgacgacgataccttcaccaagtactggacccactggatcagacaggcccctggacaaagacctgagtggctgggagtgatcagccctcacttcgccagacctatctacagctacaagttccgggacagactgaccctgaccagagacagctctctgaccgccgtgtacctggaactgaagggcctgcagcctgacgacagcggcatctacttttgcgccagagatcccttcggcgacagagcccctcactacaactaccacatggacgtgtggggcggaggcacagccgtgatagtgtcttccggcggaggtggaagtggtggtggcggtagcggaggcggtgggtccggaggtggtggatctgaagttgtgctgacacagagccctgccatcctgagtgtgtccccaggcgatagagtgatcctgtcctgcagagcctctcagggcctcgattcttctcacctggcctggtacagattcaagcggggacagatccccacactggtcatcttcggcaccagcaacagagccagaggcacccctgatagattttccggctctggcagcggagccgacttcaccctgacaatcagcagagtggaacccgaggacttcgccacctactactgccagagatacggcggcacccctatcacatttggcggcggaaccacactggacaagaaaggcggaggtggaagtggtggtggcggtagcggaggcggtgggtccggaggtggtggatctgaacctaagagcagcgacaagacccacacctgtcctccatgtcctgctccagaactgctggccggaccttccgtgttcctgtttcctccaaagcctaaggacaccctgatgatcagcagaacccctgaagtgacctgcgtggtggtggatgtgtctcacgaggaccctgaagtgaagttcaattggtacgtggacggcgtggaagtgcacaacgccaagaccaagcctagagaggaacagtacaacagcacctacagagtggtgtccgtgctgaccgtgctgcaccaggattggctgaacggcaaagagtacaagtgcaaggtgtccaacaaggccctgcctgcccctgaggaaaagaccatcagcaaggccaagggccagcctagggaaccccaggtttacacactgcctccaagccgcgaggaaatgaccaagaaccaggtgtccctgacctgcctcgtgaagggcttctacccttccgatatcgccgtggaatgggagagcaatggccagcctgagaacaactacaagacaacccctcctgtgctggacagcgacggctcattcttcctgtacagcaagctgaccgtggacaagtccagatggcagcagggcaacgtgttcagctgtagcgtgctgcacgaagccctgcacagccactacacccagaaaagcctgtctctgagccccggcaaatgataa

SEQ ID NO: 261 - RNA, 1596 nt, synthetic construct
  source 1..1596: mol_type = other RNA
atggattggatttggagaatcctgttcctcgtgggcgccgctaccggagcccactcccaaggcagactgtttcagtctggcgccgaagtgaaaagaccaggcgcctctgtgcggatcagctgcagagctgacgacgacccctacaccgacgacgataccttcaccaagtactggacccactggatcagacaggcccctggacaaagacctgagtggctgggagtgatcagccctcacttcgccagacctatctacagctacaagttccgggacagactgaccctgaccagagacagctctctgaccgccgtgtacctggaactgaagggcctgcagcctgacgacagcggcatctacttttgcgccagagatcccttcggcgacagagcccctcactacaactaccacatggacgtgtggggcggaggcacagccgtgatagtgtcttccggcggaggtggaagtggtggtggcggtagcggaggcggtgggtccggaggtggtggatctgaagttgtgctgacacagagccctgccatcctgagtgtgtccccaggcgatagagtgatcctgtcctgcagagcctctcagggcctcgattcttctcacctggcctggtacagattcaagcggggacagatccccacactggtcatcttcggcaccagcaacagagccagaggcacccctgatagattttccggctctggcagcggagccgacttcaccctgacaatcagcagagtggaacccgaggacttcgccacctactactgccagagatacggcggcacccctatcacatttggcggcggaaccacactggacaagaaaggcggaggtggaagtggtggtggcggtagcggaggcggtgggtccggaggtggtggatctgaacctaagagcagcgacaagacccacacctgtcctccatgtcctgctccagaactgctggccggaccttccgtgttcctgtttcctccaaagcctaaggacaccctgatgatcagcagaacccctgaagtgacctgcgtggtggtggatgtgtctcacgaggaccctgaagtgaagttcaattggtacgtggacggcgtggaagtgcacaacgccaagaccaagcctagagaggaacagtacaacagcacctacagagtggtgtccgtgctgaccgtgctgcaccaggattggctgaacggcaaagagtacaagtgcaaggtgtccaacaaggccctgcctgcccctatcgaaaagaccatcagcaaggccaagggccagcctagggaaccccaggtttacacactgcctccaagccgcgaggaaatgaccaagaaccaggtgtccctgacctgcctcgtgaagggcttctacccttccgatatcgccgtggaatgggagagcaatggccagcctgagaacaactacaagacaacccctcctgtgctggacagcgacggctcattcttcctgtacagcaagctgaccgtggacaagtccagatggcagcagggcaacgtgttcagctgtagcgtgctgcacgaagccctgcacagccactacacccagaaaagcctgtctctgagccccggcaaatgataa

SEQ ID NO: 262 - RNA, 1596 nt, synthetic construct
  source 1..1596: mol_type = other RNA
atggattggatttggagaatcctgttcctcgtgggcgccgctaccggagcccactcccaaggcagactgtttcagtctggcgccgaagtgaaaagaccaggcgcctctgtgcggatcagctgcagagctgacgacgacccctacaccgacgacgataccttcaccaagtactggacccactggatcagacaggcccctggacaaagacctgagtggctgggagtgatcagccctcacttcgccagacctatctacagctacaagttccgggacagactgaccctgaccagagacagctctctgaccgccgtgtacctggaactgaagggcctgcagcctgacgacagcggcatctacttttgcgccagagatcccttcggcgacagagcccctcactacaactaccacatggacgtgtggggcggaggcacagccgtgatagtgtcttccggcggaggtggaagtggtggtggcggtagcggaggcggtgggtccggaggtggtggatctgaagttgtgctgacacagagccctgccatcctgagtgtgtccccaggcgatagagtgatcctgtcctgcagagcctctcagggcctcgattcttctcacctggcctggtacagattcaagcggggacagatccccacactggtcatcttcggcaccagcaacagagccagaggcacccctgatagattttccggctctggcagcggagccgacttcaccctgacaatcagcagagtggaacccgaggacttcgccacctactactgccagagatacggcggcacccctatcacatttggcggcggaaccacactggacaagaaaggcggaggtggaagtggtggtggcggtagcggaggcggtgggtccggaggtggtggatctgaacctaagagcagcgacaagacccacacctgtcctccatgtcctgctccagaactgctgggcggaccttccgtgttcctgtttcctccaaagcctaaggacaccctgatgatcagcagaacccctgaagtgacctgcgtggtggtggatgtgtctcacgaggaccctgaagtgaagttcaattggtacgtggacggcgtggaagtgcacaacgccaagaccaagcctagagaggaacagtacaacagcacctacagagtggtgtccgtgctgaccgtgctgcaccaggattggctgaacggcaaagagtacaagtgcaaggtgtccaacaaggccctgcctgcccctgaggaaaagaccatcagcaaggccaagggccagcctagggaaccccaggtttacacactgcctccaagccgcgaggaaatgaccaagaaccaggtgtccctgacctgcctcgtgaagggcttctacccttccgatatcgccgtggaatgggagagcaatggccagcctgagaacaactacaagacaacccctcctgtgctggacagcgacggctcattcttcctgtacagcaagctgaccgtggacaagtccagatggcagcagggcaacgtgttcagctgtagcgtgctgcacgaagccctgcacagccactacacccagaaaagcctgtctctgagccccggcaaatgataa

SEQ ID NO: 263 - RNA, 1596 nt, synthetic construct
  source 1..1596: mol_type = other RNA
atggattggatttggagaatcctgttcctcgtgggcgccgctaccggagcccactcccaaggcagactgtttcagtctggcgccgaagtgaaaagaccaggcgcctctgtgcggatcagctgcagagctgacgacgacccctacaccgacgacgataccttcaccaagtactggacccactggatcagacaggcccctggacaaagacctgagtggctgggagtgatcagccctcacttcgccagacctatctacagctacaagttccgggacagactgaccctgaccagagacagctctctgaccgccgtgtacctggaactgaagggcctgcagcctgacgacagcggcatctacttttgcgccagagatcccttcggcgacagagcccctcactacaactaccacatggacgtgtggggcggaggcacagccgtgatagtgtcttccggcggaggtggaagtggtggtggcggtagcggaggcggtgggtccggaggtggtggatctgaagttgtgctgacacagagccctgccatcctgagtgtgtccccaggcgatagagtgatcctgtcctgcagagcctctcagggcctcgattcttctcacctggcctggtacagattcaagcggggacagatccccacactggtcatcttcggcaccagcaacagagccagaggcacccctgatagattttccggctctggcagcggagccgacttcaccctgacaatcagcagagtggaacccgaggacttcgccacctactactgccagagatacggcggcacccctatcacatttggcggcggaaccacactggacaagaaaggcggaggtggaagtggtggtggcggtagcggaggcggtgggtccggaggtggtggatctgaacctaagagcagcgacaagacccacacctgtcctccatgtcctgctccagaactgctcggcggaccttccgtgttcctgtttcctccaaagcctaaggacaccctgatgatcagcagaacccctgaagtgacctgcgtggtggtggatgtgtctcacgaggacccagaagtgaagttcaattggtacgtggacggcgtggaagtgcacaacgccaagaccaagcctagagaggaacagtacaacagcacctacagagtggtgtccgtgctgacagtgctgcaccaggattggctgaacggcaaagagtacaagtgcaaggtgtccaacaaggccctgcctgctcctatcgagaaaaccatcagcaaggccaagggccagcctcgcgaacctcaagtctgtacactgcctcctagccgcgaggaaatgaccaagaaccaggtgtccctgagctgcgccgtgaagggcttttacccttccgatatcgccgtggaatgggagagcaatggccagcctgagaacaactacaagacaacccctcctgtgctggacagcgacggctcattcttcctggtgtccaagctgacagtggacaagagcagatggcagcagggcaacgtgttcagctgcagcgtgctgcatgaagccctgcacagccactacacccagaagtccctgtctctgagccccggcaagtgataa

SEQ ID NO: 264 - RNA, 1596 nt, synthetic construct
  source 1..1596: mol_type = other RNA
atggattggatttggagaatcctgttcctcgtgggcgccgctaccggagcccactcccaaggcagactgtttcagtctggcgccgaagtgaaaagaccaggcgcctctgtgcggatcagctgcagagctgacgacgacccctacaccgacgacgataccttcaccaagtactggacccactggatcagacaggcccctggacaaagacctgagtggctgggagtgatcagccctcacttcgccagacctatctacagctacaagttccgggacagactgaccctgaccagagacagctctctgaccgccgtgtacctggaactgaagggcctgcagcctgacgacagcggcatctacttttgcgccagagatcccttcggcgacagagcccctcactacaactaccacatggacgtgtggggcggaggcacagccgtgatagtgtcttccggcggaggtggaagtggtggtggcggtagcggaggcggtgggtccggaggtggtggatctgaagttgtgctgacacagagccctgccatcctgagtgtgtccccaggcgatagagtgatcctgtcctgcagagcctctcagggcctcgattcttctcacctggcctggtacagattcaagcggggacagatccccacactggtcatcttcggcaccagcaacagagccagaggcacccctgatagattttccggctctggcagcggagccgacttcaccctgacaatcagcagagtggaacccgaggacttcgccacctactactgccagagatacggcggcacccctatcacatttggcggcggaaccacactggacaagaaaggcggaggtggaagtggtggtggcggtagcggaggcggtgggtccggaggtggtggatctgaacctaagagcagcgacaagacccacacctgtcctccatgtcctgctccagaactgctggccggaccttccgtgttcctgtttcctccaaagcctaaggacaccctgatgatcagcagaacccctgaagtgacctgcgtggtggtggatgtgtctcacgaggaccctgaagtgaagttcaattggtacgtggacggcgtggaagtgcacaacgccaagaccaagcctagagaggaacagtacaacagcacctacagagtggtgtccgtgctgaccgtgctgcaccaggattggctgaacggcaaagagtacaagtgcaaggtgtccaacaaggccctgcctctgcctgaggaaaagaccatcagcaaggccaagggccagcctcgcgaacctcaagtctgtacactgcctcctagccgcgaggaaatgaccaagaaccaggtgtccctgagctgcgccgtgaagggcttttacccttccgatatcgccgtggaatgggagagcaatggccagcctgagaacaactacaagacaacccctcctgtgctggacagcgacggctcattcttcctggtgtccaagctgacagtggacaagagcagatggcagcagggcaacgtgttcagctgcagcgtgctgcatgaagccctgcacagccactacacccagaagtccctgtctctgagccccggcaagtgataa

SEQ ID NO: 265 - RNA, 1596 nt, synthetic construct
  source 1..1596: mol_type = other RNA
atggattggatttggagaatcctgttcctcgtgggcgccgctaccggagcccactcccaaggcagactgtttcagtctggcgccgaagtgaaaagaccaggcgcctctgtgcggatcagctgcagagctgacgacgacccctacaccgacgacgataccttcaccaagtactggacccactggatcagacaggcccctggacaaagacctgagtggctgggagtgatcagccctcacttcgccagacctatctacagctacaagttccgggacagactgaccctgaccagagacagctctctgaccgccgtgtacctggaactgaagggcctgcagcctgacgacagcggcatctacttttgcgccagagatcccttcggcgacagagcccctcactacaactaccacatggacgtgtggggcggaggcacagccgtgatagtgtcttccggcggaggtggaagtggtggtggcggtagcggaggcggtgggtccggaggtggtggatctgaagttgtgctgacacagagccctgccatcctgagtgtgtccccaggcgatagagtgatcctgtcctgcagagcctctcagggcctcgattcttctcacctggcctggtacagattcaagcggggacagatccccacactggtcatcttcggcaccagcaacagagccagaggcacccctgatagattttccggctctggcagcggagccgacttcaccctgacaatcagcagagtggaacccgaggacttcgccacctactactgccagagatacggcggcacccctatcacatttggcggcggaaccacactggacaagaaaggcggaggtggaagtggtggtggcggtagcggaggcggtgggtccggaggtggtggatctgaacctaagagcagcgacaagacccacacctgtcctccatgtcctgctccagaactgctggccggaccttccgtgttcctgtttcctccaaagcctaaggacaccctgatgatcagcagaacccctgaagtgacctgcgtggtggtggatgtgtctcacgaggaccctgaagtgaagttcaattggtacgtggacggcgtggaagtgcacaacgccaagaccaagcctagagaggaacagtacaacagcacctacagagtggtgtccgtgctgaccgtgctgcaccaggattggctgaacggcaaagagtacaagtgcaaggtgtccaacaaggccctgcctgcccctgaggaaaagaccatcagcaaggccaagggccagcctcgcgaacctcaagtctgtacactgcctcctagccgcgaggaaatgaccaagaaccaggtgtccctgagctgcgccgtgaagggcttttacccttccgatatcgccgtggaatgggagagcaatggccagcctgagaacaactacaagacaacccctcctgtgctggacagcgacggctcattcttcctggtgtccaagctgacagtggacaagagcagatggcagcagggcaacgtgttcagctgcagcgtgctgcatgaagccctgcacagccactacacccagaagtccctgtctctgagccccggcaagtgataa

SEQ ID NO: 266 - RNA, 1596 nt, synthetic construct
  source 1..1596: mol_type = other RNA
atggattggatttggagaatcctgttcctcgtgggcgccgctaccggagcccactcccaaggcagactgtttcagtctggcgccgaagtgaaaagaccaggcgcctctgtgcggatcagctgcagagctgacgacgacccctacaccgacgacgataccttcaccaagtactggacccactggatcagacaggcccctggacaaagacctgagtggctgggagtgatcagccctcacttcgccagacctatctacagctacaagttccgggacagactgaccctgaccagagacagctctctgaccgccgtgtacctggaactgaagggcctgcagcctgacgacagcggcatctacttttgcgccagagatcccttcggcgacagagcccctcactacaactaccacatggacgtgtggggcggaggcacagccgtgatagtgtcttccggcggaggtggaagtggtggtggcggtagcggaggcggtgggtccggaggtggtggatctgaagttgtgctgacacagagccctgccatcctgagtgtgtccccaggcgatagagtgatcctgtcctgcagagcctctcagggcctcgattcttctcacctggcctggtacagattcaagcggggacagatccccacactggtcatcttcggcaccagcaacagagccagaggcacccctgatagattttccggctctggcagcggagccgacttcaccctgacaatcagcagagtggaacccgaggacttcgccacctactactgccagagatacggcggcacccctatcacatttggcggcggaaccacactggacaagaaaggcggaggtggaagtggtggtggcggtagcggaggcggtgggtccggaggtggtggatctgaacctaagagcagcgacaagacccacacctgtcctccatgtcctgctccagaactgctggccggaccttccgtgttcctgtttcctccaaagcctaaggacaccctgatgatcagcagaacccctgaagtgacctgcgtggtggtggatgtgtctcacgaggaccctgaagtgaagttcaattggtacgtggacggcgtggaagtgcacaacgccaagaccaagcctagagaggaacagtacaacagcacctacagagtggtgtccgtgctgaccgtgctgcaccaggattggctgaacggcaaagagtacaagtgcaaggtgtccaacaaggccctgcctgcccctatcgaaaagaccatcagcaaggccaagggccagcctcgcgaacctcaagtctgtacactgcctcctagccgcgaggaaatgaccaagaaccaggtgtccctgagctgcgccgtgaagggcttttacccttccgatatcgccgtggaatgggagagcaatggccagcctgagaacaactacaagacaacccctcctgtgctggacagcgacggctcattcttcctggtgtccaagctgacagtggacaagagcagatggcagcagggcaacgtgttcagctgcagcgtgctgcatgaagccctgcacagccactacacccagaagtccctgtctctgagccccggcaagtgataa

SEQ ID NO: 267 - RNA, 1596 nt, synthetic construct
  source 1..1596: mol_type = other RNA
atggattggatttggagaatcctgttcctcgtgggcgccgctaccggagcccactcccaaggcagactgtttcagtctggcgccgaagtgaaaagaccaggcgcctctgtgcggatcagctgcagagctgacgacgacccctacaccgacgacgataccttcaccaagtactggacccactggatcagacaggcccctggacaaagacctgagtggctgggagtgatcagccctcacttcgccagacctatctacagctacaagttccgggacagactgaccctgaccagagacagctctctgaccgccgtgtacctggaactgaagggcctgcagcctgacgacagcggcatctacttttgcgccagagatcccttcggcgacagagcccctcactacaactaccacatggacgtgtggggcggaggcacagccgtgatagtgtcttccggcggaggtggaagtggtggtggcggtagcggaggcggtgggtccggaggtggtggatctgaagttgtgctgacacagagccctgccatcctgagtgtgtccccaggcgatagagtgatcctgtcctgcagagcctctcagggcctcgattcttctcacctggcctggtacagattcaagcggggacagatccccacactggtcatcttcggcaccagcaacagagccagaggcacccctgatagattttccggctctggcagcggagccgacttcaccctgacaatcagcagagtggaacccgaggacttcgccacctactactgccagagatacggcggcacccctatcacatttggcggcggaaccacactggacaagaaaggcggaggtggaagtggtggtggcggtagcggaggcggtgggtccggaggtggtggatctgaacctaagagcagcgacaagacccacacctgtcctccatgtcctgctccagaactgctgggcggaccttccgtgttcctgtttcctccaaagcctaaggacaccctgatgatcagcagaacccctgaagtgacctgcgtggtggtggatgtgtctcacgaggaccctgaagtgaagttcaattggtacgtggacggcgtggaagtgcacaacgccaagaccaagcctagagaggaacagtacaacagcacctacagagtggtgtccgtgctgaccgtgctgcaccaggattggctgaacggcaaagagtacaagtgcaaggtgtccaacaaggccctgcctgcccctgaggaaaagaccatcagcaaggccaagggccagcctcgcgaacctcaagtctgtacactgcctcctagccgcgaggaaatgaccaagaaccaggtgtccctgagctgcgccgtgaagggcttttacccttccgatatcgccgtggaatgggagagcaatggccagcctgagaacaactacaagacaacccctcctgtgctggacagcgacggctcattcttcctggtgtccaagctgacagtggacaagagcagatggcagcagggcaacgtgttcagctgcagcgtgctgcatgaagccctgcacagccactacacccagaagtccctgtctctgagccccggcaagtgataa

SEQ ID NO: 268 - RNA, 1596 nt, synthetic construct
  source 1..1596: mol_type = other RNA
atggattggatttggagaatcctgttcctcgtgggcgccgctaccggagcccactcccaaggcagactgtttcagtctggcgccgaagtgaaaagaccaggcgcctctgtgcggatcagctgcagagctgacgacgacccctacaccgacgacgataccttcaccaagtactggacccactggatcagacaggcccctggacaaagacctgagtggctgggagtgatcagccctcacttcgccagacctatctacagctacaagttccgggacagactgaccctgaccagagacagctctctgaccgccgtgtacctggaactgaagggcctgcagcctgacgacagcggcatctacttttgcgccagagatcccttcggcgacagagcccctcactacaactaccacatggacgtgtggggcggaggcacagccgtgatagtgtcttccggcggaggtggaagtggtggtggcggtagcggaggcggtgggtccggaggtggtggatctgaagttgtgctgacacagagccctgccatcctgagtgtgtccccaggcgatagagtgatcctgtcctgcagagcctctcagggcctcgattcttctcacctggcctggtacagattcaagcggggacagatccccacactggtcatcttcggcaccagcaacagagccagaggcacccctgatagattttccggctctggcagcggagccgacttcaccctgacaatcagcagagtggaacccgaggacttcgccacctactactgccagagatacggcggcacccctatcacatttggcggcggaaccacactggacaagaaaggcggaggtggaagtggtggtggcggtagcggaggcggtgggtccggaggtggtggatctgaacctaagagcagcgacaagacccacacctgtcctccatgtcctgctccagaactgctcggcggaccttccgtgttcctgtttcctccaaagcctaaggacaccctgatgatcagcagaacccctgaagtgacctgcgtggtggtggatgtgtctcacgaggacccagaagtgaagttcaattggtacgtggacggcgtggaagtgcacaacgccaagaccaagcctagagaggaacagtacaacagcacctacagagtggtgtccgtgctgacagtgctgcaccaggattggctgaacggcaaagagtacaagtgcaaggtgtccaacaaggccctgcctgctcctatcgagaaaaccatcagcaaggccaagggccagcctagggaaccccaggtttacaccctgcctccatgccgcgaggaaatgaccaagaaccaggtgtccctgtggtgcctggtcaagggcttctacccttccgatatcgccgtggaatgggagagcaatggccagcctgagaacaactacaagacaacccctcctgtgctggacagcgacggctcattcttcctgtacagcaagctgacagtggacaagagcagatggcagcagggcaacgtgttcagctgcagcgtgctgcatgaagccctgcacagccactacacccagaagtccctgtctctgagccccggcaagtgataa

SEQ ID NO: 269 - RNA, 1596 nt, synthetic construct
  source 1..1596: mol_type = other RNA
atggattggatttggagaatcctgttcctcgtgggcgccgctaccggagcccactcccaaggcagactgtttcagtctggcgccgaagtgaaaagaccaggcgcctctgtgcggatcagctgcagagctgacgacgacccctacaccgacgacgataccttcaccaagtactggacccactggatcagacaggcccctggacaaagacctgagtggctgggagtgatcagccctcacttcgccagacctatctacagctacaagttccgggacagactgaccctgaccagagacagctctctgaccgccgtgtacctggaactgaagggcctgcagcctgacgacagcggcatctacttttgcgccagagatcccttcggcgacagagcccctcactacaactaccacatggacgtgtggggcggaggcacagccgtgatagtgtcttccggcggaggtggaagtggtggtggcggtagcggaggcggtgggtccggaggtggtggatctgaagttgtgctgacacagagccctgccatcctgagtgtgtccccaggcgatagagtgatcctgtcctgcagagcctctcagggcctcgattcttctcacctggcctggtacagattcaagcggggacagatccccacactggtcatcttcggcaccagcaacagagccagaggcacccctgatagattttccggctctggcagcggagccgacttcaccctgacaatcagcagagtggaacccgaggacttcgccacctactactgccagagatacggcggcacccctatcacatttggcggcggaaccacactggacaagaaaggcggaggtggaagtggtggtggcggtagcggaggcggtgggtccggaggtggtggatctgaacctaagagcagcgacaagacccacacctgtcctccatgtcctgctccagaactgctggccggaccttccgtgttcctgtttcctccaaagcctaaggacaccctgatgatcagcagaacccctgaagtgacctgcgtggtggtggatgtgtctcacgaggaccctgaagtgaagttcaattggtacgtggacggcgtggaagtgcacaacgccaagaccaagcctagagaggaacagtacaacagcacctacagagtggtgtccgtgctgaccgtgctgcaccaggattggctgaacggcaaagagtacaagtgcaaggtgtccaacaaggccctgcctctgcctgaggaaaagaccatcagcaaggccaagggccagcctagggaaccccaggtttacaccctgcctccatgccgcgaggaaatgaccaagaaccaggtgtccctgtggtgcctggtcaagggcttctacccttccgatatcgccgtggaatgggagagcaatggccagcctgagaacaactacaagacaacccctcctgtgctggacagcgacggctcattcttcctgtacagcaagctgacagtggacaagagcagatggcagcagggcaacgtgttcagctgcagcgtgctgcatgaagccctgcacagccactacacccagaagtccctgtctctgagccccggcaagtgataa

SEQ ID NO: 270 - RNA, 1596 nt, synthetic construct
  source 1..1596: mol_type = other RNA
atggattggatttggagaatcctgttcctcgtgggcgccgctaccggagcccactcccaaggcagactgtttcagtctggcgccgaagtgaaaagaccaggcgcctctgtgcggatcagctgcagagctgacgacgacccctacaccgacgacgataccttcaccaagtactggacccactggatcagacaggcccctggacaaagacctgagtggctgggagtgatcagccctcacttcgccagacctatctacagctacaagttccgggacagactgaccctgaccagagacagctctctgaccgccgtgtacctggaactgaagggcctgcagcctgacgacagcggcatctacttttgcgccagagatcccttcggcgacagagcccctcactacaactaccacatggacgtgtggggcggaggcacagccgtgatagtgtcttccggcggaggtggaagtggtggtggcggtagcggaggcggtgggtccggaggtggtggatctgaagttgtgctgacacagagccctgccatcctgagtgtgtccccaggcgatagagtgatcctgtcctgcagagcctctcagggcctcgattcttctcacctggcctggtacagattcaagcggggacagatccccacactggtcatcttcggcaccagcaacagagccagaggcacccctgatagattttccggctctggcagcggagccgacttcaccctgacaatcagcagagtggaacccgaggacttcgccacctactactgccagagatacggcggcacccctatcacatttggcggcggaaccacactggacaagaaaggcggaggtggaagtggtggtggcggtagcggaggcggtgggtccggaggtggtggatctgaacctaagagcagcgacaagacccacacctgtcctccatgtcctgctccagaactgctggccggaccttccgtgttcctgtttcctccaaagcctaaggacaccctgatgatcagcagaacccctgaagtgacctgcgtggtggtggatgtgtctcacgaggaccctgaagtgaagttcaattggtacgtggacggcgtggaagtgcacaacgccaagaccaagcctagagaggaacagtacaacagcacctacagagtggtgtccgtgctgaccgtgctgcaccaggattggctgaacggcaaagagtacaagtgcaaggtgtccaacaaggccctgcctgcccctgaggaaaagaccatcagcaaggccaagggccagcctagggaaccccaggtttacaccctgcctccatgccgcgaggaaatgaccaagaaccaggtgtccctgtggtgcctggtcaagggcttctacccttccgatatcgccgtggaatgggagagcaatggccagcctgagaacaactacaagacaacccctcctgtgctggacagcgacggctcattcttcctgtacagcaagctgacagtggacaagagcagatggcagcagggcaacgtgttcagctgcagcgtgctgcatgaagccctgcacagccactacacccagaagtccctgtctctgagccccggcaagtgataa

SEQ ID NO: 271 - RNA, 1596 nt, synthetic construct
  source 1..1596: mol_type = other RNA
atggattggatttggagaatcctgttcctcgtgggcgccgctaccggagcccactcccaaggcagactgtttcagtctggcgccgaagtgaaaagaccaggcgcctctgtgcggatcagctgcagagctgacgacgacccctacaccgacgacgataccttcaccaagtactggacccactggatcagacaggcccctggacaaagacctgagtggctgggagtgatcagccctcacttcgccagacctatctacagctacaagttccgggacagactgaccctgaccagagacagctctctgaccgccgtgtacctggaactgaagggcctgcagcctgacgacagcggcatctacttttgcgccagagatcccttcggcgacagagcccctcactacaactaccacatggacgtgtggggcggaggcacagccgtgatagtgtcttccggcggaggtggaagtggtggtggcggtagcggaggcggtgggtccggaggtggtggatctgaagttgtgctgacacagagccctgccatcctgagtgtgtccccaggcgatagagtgatcctgtcctgcagagcctctcagggcctcgattcttctcacctggcctggtacagattcaagcggggacagatccccacactggtcatcttcggcaccagcaacagagccagaggcacccctgatagattttccggctctggcagcggagccgacttcaccctgacaatcagcagagtggaacccgaggacttcgccacctactactgccagagatacggcggcacccctatcacatttggcggcggaaccacactggacaagaaaggcggaggtggaagtggtggtggcggtagcggaggcggtgggtccggaggtggtggatctgaacctaagagcagcgacaagacccacacctgtcctccatgtcctgctccagaactgctggccggaccttccgtgttcctgtttcctccaaagcctaaggacaccctgatgatcagcagaacccctgaagtgacctgcgtggtggtggatgtgtctcacgaggaccctgaagtgaagttcaattggtacgtggacggcgtggaagtgcacaacgccaagaccaagcctagagaggaacagtacaacagcacctacagagtggtgtccgtgctgaccgtgctgcaccaggattggctgaacggcaaagagtacaagtgcaaggtgtccaacaaggccctgcctgcccctatcgaaaagaccatcagcaaggccaagggccagcctagggaaccccaggtttacaccctgcctccatgccgcgaggaaatgaccaagaaccaggtgtccctgtggtgcctggtcaagggcttctacccttccgatatcgccgtggaatgggagagcaatggccagcctgagaacaactacaagacaacccctcctgtgctggacagcgacggctcattcttcctgtacagcaagctgacagtggacaagagcagatggcagcagggcaacgtgttcagctgcagcgtgctgcatgaagccctgcacagccactacacccagaagtccctgtctctgagccccggcaagtgataa

SEQ ID NO: 272 - RNA, 1596 nt, synthetic construct
  source 1..1596: mol_type = other RNA
atggattggatttggagaatcctgttcctcgtgggcgccgctaccggagcccactcccaaggcagactgtttcagtctggcgccgaagtgaaaagaccaggcgcctctgtgcggatcagctgcagagctgacgacgacccctacaccgacgacgataccttcaccaagtactggacccactggatcagacaggcccctggacaaagacctgagtggctgggagtgatcagccctcacttcgccagacctatctacagctacaagttccgggacagactgaccctgaccagagacagctctctgaccgccgtgtacctggaactgaagggcctgcagcctgacgacagcggcatctacttttgcgccagagatcccttcggcgacagagcccctcactacaactaccacatggacgtgtggggcggaggcacagccgtgatagtgtcttccggcggaggtggaagtggtggtggcggtagcggaggcggtgggtccggaggtggtggatctgaagttgtgctgacacagagccctgccatcctgagtgtgtccccaggcgatagagtgatcctgtcctgcagagcctctcagggcctcgattcttctcacctggcctggtacagattcaagcggggacagatccccacactggtcatcttcggcaccagcaacagagccagaggcacccctgatagattttccggctctggcagcggagccgacttcaccctgacaatcagcagagtggaacccgaggacttcgccacctactactgccagagatacggcggcacccctatcacatttggcggcggaaccacactggacaagaaaggcggaggtggaagtggtggtggcggtagcggaggcggtgggtccggaggtggtggatctgaacctaagagcagcgacaagacccacacctgtcctccatgtcctgctccagaactgctgggcggaccttccgtgttcctgtttcctccaaagcctaaggacaccctgatgatcagcagaacccctgaagtgacctgcgtggtggtggatgtgtctcacgaggaccctgaagtgaagttcaattggtacgtggacggcgtggaagtgcacaacgccaagaccaagcctagagaggaacagtacaacagcacctacagagtggtgtccgtgctgaccgtgctgcaccaggattggctgaacggcaaagagtacaagtgcaaggtgtccaacaaggccctgcctgcccctgaggaaaagaccatcagcaaggccaagggccagcctagggaaccccaggtttacaccctgcctccatgccgcgaggaaatgaccaagaaccaggtgtccctgtggtgcctggtcaagggcttctacccttccgatatcgccgtggaatgggagagcaatggccagcctgagaacaactacaagacaacccctcctgtgctggacagcgacggctcattcttcctgtacagcaagctgacagtggacaagagcagatggcagcagggcaacgtgttcagctgcagcgtgctgcatgaagccctgcacagccactacacccagaagtccctgtctctgagccccggcaagtgataa

SEQ ID NO: 273 - RNA, 1596 nt, synthetic construct; identical to SEQ ID NO: 257
  source 1..1596: mol_type = other RNA

SEQ ID NO: 274 - RNA, 1596 nt, synthetic construct; identical to SEQ ID NO: 258
  source 1..1596: mol_type = other RNA

SEQ ID NO: 275 - RNA, 1596 nt, synthetic construct; identical to SEQ ID NO: 259
  source 1..1596: mol_type = other RNA

SEQ ID NO: 276 - RNA, 1596 nt, synthetic construct; identical to SEQ ID NO: 260
  source 1..1596: mol_type = other RNA

SEQ ID NO: 277 - RNA, 1596 nt, synthetic construct; identical to SEQ ID NO: 261
  source 1..1596: mol_type = other RNA

SEQ ID NO: 278 - RNA, 1596 nt, synthetic construct; identical to SEQ ID NO: 262
  source 1..1596: mol_type = other RNA

SEQ ID NO: 279 - RNA, 1596 nt, synthetic construct; identical to SEQ ID NO: 263
  source 1..1596: mol_type = other RNA

SEQ ID NO: 280 - RNA, 1596 nt, synthetic construct; identical to SEQ ID NO: 264
  source 1..1596: mol_type = other RNA

SEQ ID NO: 281 - RNA, 1596 nt, synthetic construct; identical to SEQ ID NO: 265
  source 1..1596: mol_type = other RNA

SEQ ID NO: 282 - RNA, 1596 nt, synthetic construct; identical to SEQ ID NO: 266
  source 1..1596: mol_type = other RNA

SEQ ID NO: 283 - RNA, 1596 nt, synthetic construct; identical to SEQ ID NO: 267
  source 1..1596: mol_type = other RNA

SEQ ID NO: 284 - RNA, 1596 nt, synthetic construct; identical to SEQ ID NO: 268
  source 1..1596: mol_type = other RNA

SEQ ID NO: 285 - RNA, 1596 nt, synthetic construct; identical to SEQ ID NO: 269
  source 1..1596: mol_type = other RNA

SEQ ID NO: 286 - RNA, 1596 nt, synthetic construct; identical to SEQ ID NO: 270
  source 1..1596: mol_type = other RNA

SEQ ID NO: 287 - RNA, 1596 nt, synthetic construct; identical to SEQ ID NO: 271
  source 1..1596: mol_type = other RNA

SEQ ID NO: 288 - RNA, 1596 nt, synthetic construct; identical to SEQ ID NO: 272
  source 1..1596: mol_type = other RNA

SEQ ID NO: 289 - RNA, 1596 nt, synthetic construct
  source 1..1596: mol_type = other RNA
atggattggatttggagaatcctgttcctcgtgggcgccgctaccggagcccactcccaaggcagactgtttcagtctggcgccgaagtgaaaagaccaggcgcctctgtgcggatcagctgcagagctgacgacgacccctacaccgacgacgataccttcaccaagtactggacccactggatcagacaggcccctggacaaagacctgagtggctgggagtgatcagccctcacttcgccagacctatctacagctacaagttccgggacagactgaccctgaccagagacagctctctgaccgccgtgtacctggaactgaagggcctgcagcctgacgacagcggcatctacttttgcgccagagatcccttcggcgacagagcccctcactacaactaccacatggacgtgtggggcggaggcacagccgtgatagtgtcttccggcggaggtggaagtggtggtggcggtagcggaggcggtgggtccggaggtggtggatctgaagttgtgctgacacagagccctgccatcctgagtgtgtccccaggcgatagagtgatcctgtcctgcagagcctctcagggcctcgattcttctcacctggcctggtacagattcaagcggggacagatccccacactggtcatcttcggcaccagcaacagagccagaggcacccctgatagattttccggctctggcagcggagccgacttcaccctgacaatcagcagagtggaacccgaggacttcgccacctactactgccagagatacggcggcacccctatcacatttggcggcggaaccacactggacaagaaaggcggaggtggaagtggtggtggcggtagcggaggcggtgggtccggaggtggtggatctgaacctaagagcagcgacaagacccacacctgtcctccatgtcctgctccagaactgctcggcggaccttccgtgttcctgtttcctccaaagcctaaggacaccctgatgatcagcagaacccctgaagtgacctgcgtggtggtggatgtgtctcacgaggacccagaagtgaagttcaattggtacgtggacggcgtggaagtgcacaacgccaagaccaagcctagagaggaacagtacaacagcacctacagagtggtgtccgtgctgacagtgctgcaccaggattggctgaacggcaaagagtacaagtgcaaggtgtccaacaaggccctgcctgctcctatcgagaaaaccatcagcaaggccaagggccagcctagggaaccccaggtttacacactgcctccaagccgcgacgaactgaccaagaaccaggtgtccctgacctgcctcgtgaagggcttctacccttccgatatcgccgtggaatgggagagcaatggccagcctgagaacaactacaagacaacccctcctgtgctggacagcgacggctcattcttcctgtacagcaagctgactgtggataagtcccggtggcagcagggcaacgtgttcagctgttctgtgatgcacgaagccctgcacaaccactacacccagaaaagcctgtctctgagccccggcaagtgataa

SEQ ID NO: 290 - RNA, 1596 nt, synthetic construct
  source 1..1596: mol_type = other RNA
atggattggatttggagaatcctgttcctcgtgggcgccgctaccggagcccactcccaaggcagactgtttcagtctggcgccgaagtgaaaagaccaggcgcctctgtgcggatcagctgcagagctgacgacgacccctacaccgacgacgataccttcaccaagtactggacccactggatcagacaggcccctggacaaagacctgagtggctgggagtgatcagccctcacttcgccagacctatctacagctacaagttccgggacagactgaccctgaccagagacagctctctgaccgccgtgtacctggaactgaagggcctgcagcctgacgacagcggcatctacttttgcgccagagatcccttcggcgacagagcccctcactacaactaccacatggacgtgtggggcggaggcacagccgtgatagtgtcttccggcggaggtggaagtggtggtggcggtagcggaggcggtgggtccggaggtggtggatctgaagttgtgctgacacagagccctgccatcctgagtgtgtccccaggcgatagagtgatcctgtcctgcagagcctctcagggcctcgattcttctcacctggcctggtacagattcaagcggggacagatccccacactggtcatcttcggcaccagcaacagagccagaggcacccctgatagattttccggctctggcagcggagccgacttcaccctgacaatcagcagagtggaacccgaggacttcgccacctactactgccagagatacggcggcacccctatcacatttggcggcggaaccacactggacaagaaaggcggaggtggaagtggtggtggcggtagcggaggcggtgggtccggaggtggtggatctgaacctaagagcagcgacaagacccacacctgtcctccatgtcctgctccagaactgctcggcggaccttccgtgttcctgtttcctccaaagcctaaggacaccctgatgatcagcagaacccctgaagtgacctgcgtggtggtggatgtgtctcacgaggacccagaagtgaagttcaattggtacgtggacggcgtggaagtgcacaacgccaagaccaagcctagagaggaacagtacaacagcacctacagagtggtgtccgtgctgacagtgctgcaccaggattggctgaacggcaaagagtacaagtgcaaggtgtccaacaaggccctgcctgctcctatcgagaaaaccatcagcaaggccaagggccagcctagggaaccccaggtttacacactgcctccaagccgcgacgaactgaccaagaaccaggtgtccctgacctgcctcgtgaagggcttctacccttccgatatcgccgtggaatgggagagcaatggccagcctgagaacaactacaagacaacccctcctgtgctggacagcgacggctcattcttcctgtacagcaagctgaccgtggacaagtccagatggcagcagggcaacgtgttcagctgtagcgtgctgcacgaagccctgcacagccactacacccagaaaagcctgtctctgagccccggcaaatgataa

SEQ ID NO: 291 - RNA, 1596 nt, synthetic construct
  source 1..1596: mol_type = other RNA
atggattggatttggagaatcctgttcctcgtgggcgccgctaccggagcccactcccaaggcagactgtttcagtctggcgccgaagtgaaaagaccaggcgcctctgtgcggatcagctgcagagctgacgacgacccctacaccgacgacgataccttcaccaagtactggacccactggatcagacaggcccctggacaaagacctgagtggctgggagtgatcagccctcacttcgccagacctatctacagctacaagttccgggacagactgaccctgaccagagacagctctctgaccgccgtgtacctggaactgaagggcctgcagcctgacgacagcggcatctacttttgcgccagagatcccttcggcgacagagcccctcactacaactaccacatggacgtgtggggcggaggcacagccgtgatagtgtcttccggcggaggtggaagtggtggtggcggtagcggaggcggtgggtccggaggtggtggatctgaagttgtgctgacacagagccctgccatcctgagtgtgtccccaggcgatagagtgatcctgtcctgcagagcctctcagggcctcgattcttctcacctggcctggtacagattcaagcggggacagatccccacactggtcatcttcggcaccagcaacagagccagaggcacccctgatagattttccggctctggcagcggagccgacttcaccctgacaatcagcagagtggaacccgaggacttcgccacctactactgccagagatacggcggcacccctatcacatttggcggcggaaccacactggacaagaaaggcggaggtggaagtggtggtggcggtagcggaggcggtgggtccggaggtggtggatctgaacctaagagcagcgacaagacccacacctgtcctccatgtcctgctccagaactgctggccggaccttccgtgttcctgtttcctccaaagcctaaggacaccctgatgatcagcagaacccctgaagtgacctgcgtggtggtggatgtgtctcacgaggaccctgaagtgaagttcaattggtacgtggacggcgtggaagtgcacaacgccaagaccaagcctagagaggaacagtacaacagcacctacagagtggtgtccgtgctgaccgtgctgcaccaggattggctgaacggcaaagagtacaagtgcaaggtgtccaacaaggccctgcctctgcctgaggaaaagaccatcagcaaggccaagggccagcctagggaaccccaggtttacacactgcctccaagccgcgacgaactgaccaagaaccaggtgtccctgacctgcctcgtgaagggcttctacccttccgatatcgccgtggaatgggagagcaatggccagcctgagaacaactacaagacaacccctcctgtgctggacagcgacggctcattcttcctgtacagcaagctgaccgtggacaagtccagatggcagcagggcaacgtgttcagctgtagcgtgctgcacgaagccctgcacagccactacacccagaaaagcctgtctctgagccccggcaaatgataa

SEQ ID NO: 292 - RNA, 1596 nt, synthetic construct
  source 1..1596: mol_type = other RNA
atggattggatttggagaatcctgttcctcgtgggcgccgctaccggagcccactcccaaggcagactgtttcagtctggcgccgaagtgaaaagaccaggcgcctctgtgcggatcagctgcagagctgacgacgacccctacaccgacgacgataccttcaccaagtactggacccactggatcagacaggcccctggacaaagacctgagtggctgggagtgatcagccctcacttcgccagacctatctacagctacaagttccgggacagactgaccctgaccagagacagctctctgaccgccgtgtacctggaactgaagggcctgcagcctgacgacagcggcatctacttttgcgccagagatcccttcggcgacagagcccctcactacaactaccacatggacgtgtggggcggaggcacagccgtgatagtgtcttccggcggaggtggaagtggtggtggcggtagcggaggcggtgggtccggaggtggtggatctgaagttgtgctgacacagagccctgccatcctgagtgtgtccccaggcgatagagtgatcctgtcctgcagagcctctcagggcctcgattcttctcacctggcctggtacagattcaagcggggacagatccccacactggtcatcttcggcaccagcaacagagccagaggcacccctgatagattttccggctctggcagcggagccgacttcaccctgacaatcagcagagtggaacccgaggacttcgccacctactactgccagagatacggcggcacccctatcacatttggcggcggaaccacactggacaagaaaggcggaggtggaagtggtggtggcggtagcggaggcggtgggtccggaggtggtggatctgaacctaagagcagcgacaagacccacacctgtcctccatgtcctgctccagaactgctggccggaccttccgtgttcctgtttcctccaaagcctaaggacaccctgatgatcagcagaacccctgaagtgacctgcgtggtggtggatgtgtctcacgaggaccctgaagtgaagttcaattggtacgtggacggcgtggaagtgcacaacgccaagaccaagcctagagaggaacagtacaacagcacctacagagtggtgtccgtgctgaccgtgctgcaccaggattggctgaacggcaaagagtacaagtgcaaggtgtccaacaaggccctgcctgcccctgaggaaaagaccatcagcaaggccaagggccagcctagggaaccccaggtttacacactgcctccaagccgcgacgaactgaccaagaaccaggtgtccctgacctgcctcgtgaagggcttctacccttccgatatcgccgtggaatgggagagcaatggccagcctgagaacaactacaagacaacccctcctgtgctggacagcgacggctcattcttcctgtacagcaagctgaccgtggacaagtccagatggcagcagggcaacgtgttcagctgtagcgtgctgcacgaagccctgcacagccactacacccagaaaagcctgtctctgagccccggcaaatgataa

SEQ ID NO: 293 - RNA, 1596 nt, synthetic construct
  source 1..1596: mol_type = other RNA
atggattggatttggagaatcctgttcctcgtgggcgccgctaccggagcccactcccaaggcagactgtttcagtctggcgccgaagtgaaaagaccaggcgcctctgtgcggatcagctgcagagctgacgacgacccctacaccgacgacgataccttcaccaagtactggacccactggatcagacaggcccctggacaaagacctgagtggctgggagtgatcagccctcacttcgccagacctatctacagctacaagttccgggacagactgaccctgaccagagacagctctctgaccgccgtgtacctggaactgaagggcctgcagcctgacgacagcggcatctacttttgcgccagagatcccttcggcgacagagcccctcactacaactaccacatggacgtgtggggcggaggcacagccgtgatagtgtcttccggcggaggtggaagtggtggtggcggtagcggaggcggtgggtccggaggtggtggatctgaagttgtgctgacacagagccctgccatcctgagtgtgtccccaggcgatagagtgatcctgtcctgcagagcctctcagggcctcgattcttctcacctggcctggtacagattcaagcggggacagatccccacactggtcatcttcggcaccagcaacagagccagaggcacccctgatagattttccggctctggcagcggagccgacttcaccctgacaatcagcagagtggaacccgaggacttcgccacctactactgccagagatacggcggcacccctatcacatttggcggcggaaccacactggacaagaaaggcggaggtggaagtggtggtggcggtagcggaggcggtgggtccggaggtggtggatctgaacctaagagcagcgacaagacccacacctgtcctccatgtcctgctccagaactgctggccggaccttccgtgttcctgtttcctccaaagcctaaggacaccctgatgatcagcagaacccctgaagtgacctgcgtggtggtggatgtgtctcacgaggaccctgaagtgaagttcaattggtacgtggacggcgtggaagtgcacaacgccaagaccaagcctagagaggaacagtacaacagcacctacagagtggtgtccgtgctgaccgtgctgcaccaggattggctgaacggcaaagagtacaagtgcaaggtgtccaacaaggccctgcctgcccctatcgaaaagaccatcagcaaggccaagggccagcctagggaaccccaggtttacacactgcctccaagccgcgacgaactgaccaagaaccaggtgtccctgacctgcctcgtgaagggcttctacccttccgatatcgccgtggaatgggagagcaatggccagcctgagaacaactacaagacaacccctcctgtgctggacagcgacggctcattcttcctgtacagcaagctgaccgtggacaagtccagatggcagcagggcaacgtgttcagctgtagcgtgctgcacgaagccctgcacagccactacacccagaaaagcctgtctctgagccccggcaaatgataa

SEQ ID NO: 294 - RNA, 1596 nt, synthetic construct
  source 1..1596: mol_type = other RNA
atggattggatttggagaatcctgttcctcgtgggcgccgctaccggagcccactcccaaggcagactgtttcagtctggcgccgaagtgaaaagaccaggcgcctctgtgcggatcagctgcagagctgacgacgacccctacaccgacgacgataccttcaccaagtactggacccactggatcagacaggcccctggacaaagacctgagtggctgggagtgatcagccctcacttcgccagacctatctacagctacaagttccgggacagactgaccctgaccagagacagctctctgaccgccgtgtacctggaactgaagggcctgcagcctgacgacagcggcatctacttttgcgccagagatcccttcggcgacagagcccctcactacaactaccacatggacgtgtggggcggaggcacagccgtgatagtgtcttccggcggaggtggaagtggtggtggcggtagcggaggcggtgggtccggaggtggtggatctgaagttgtgctgacacagagccctgccatcctgagtgtgtccccaggcgatagagtgatcctgtcctgcagagcctctcagggcctcgattcttctcacctggcctggtacagattcaagcggggacagatccccacactggtcatcttcggcaccagcaacagagccagaggcacccctgatagattttccggctctggcagcggagccgacttcaccctgacaatcagcagagtggaacccgaggacttcgccacctactactgccagagatacggcggcacccctatcacatttggcggcggaaccacactggacaagaaaggcggaggtggaagtggtggtggcggtagcggaggcggtgggtccggaggtggtggatctgaacctaagagcagcgacaagacccacacctgtcctccatgtcctgctccagaactgctgggcggaccttccgtgttcctgtttcctccaaagcctaaggacaccctgatgatcagcagaacccctgaagtgacctgcgtggtggtggatgtgtctcacgaggaccctgaagtgaagttcaattggtacgtggacggcgtggaagtgcacaacgccaagaccaagcctagagaggaacagtacaacagcacctacagagtggtgtccgtgctgaccgtgctgcaccaggattggctgaacggcaaagagtacaagtgcaaggtgtccaacaaggccctgcctgcccctgaggaaaagaccatcagcaaggccaagggccagcctagggaaccccaggtttacacactgcctccaagccgcgacgaactgaccaagaaccaggtgtccctgacctgcctcgtgaagggcttctacccttccgatatcgccgtggaatgggagagcaatggccagcctgagaacaactacaagacaacccctcctgtgctggacagcgacggctcattcttcctgtacagcaagctgaccgtggacaagtccagatggcagcagggcaacgtgttcagctgtagcgtgctgcacgaagccctgcacagccactacacccagaaaagcctgtctctgagccccggcaaatgataa

SEQ ID NO: 295 - RNA, 1596 nt, synthetic construct
  source 1..1596: mol_type = other RNA
atggattggatttggagaatcctgttcctcgtgggcgccgctaccggagcccactcccaaggcagactgtttcagtctggcgccgaagtgaaaagaccaggcgcctctgtgcggatcagctgcagagctgacgacgacccctacaccgacgacgataccttcaccaagtactggacccactggatcagacaggcccctggacaaagacctgagtggctgggagtgatcagccctcacttcgccagacctatctacagctacaagttccgggacagactgaccctgaccagagacagctctctgaccgccgtgtacctggaactgaagggcctgcagcctgacgacagcggcatctacttttgcgccagagatcccttcggcgacagagcccctcactacaactaccacatggacgtgtggggcggaggcacagccgtgatagtgtcttccggcggaggtggaagtggtggtggcggtagcggaggcggtgggtccggaggtggtggatctgaagttgtgctgacacagagccctgccatcctgagtgtgtccccaggcgatagagtgatcctgtcctgcagagcctctcagggcctcgattcttctcacctggcctggtacagattcaagcggggacagatccccacactggtcatcttcggcaccagcaacagagccagaggcacccctgatagattttccggctctggcagcggagccgacttcaccctgacaatcagcagagtggaacccgaggacttcgccacctactactgccagagatacggcggcacccctatcacatttggcggcggaaccacactggacaagaaaggcggaggtggaagtggtggtggcggtagcggaggcggtgggtccggaggtggtggatctgaacctaagagcagcgacaagacccacacctgtcctccatgtcctgctccagaactgctcggcggaccttccgtgttcctgtttcctccaaagcctaaggacaccctgatgatcagcagaacccctgaagtgacctgcgtggtggtggatgtgtctcacgaggacccagaagtgaagttcaattggtacgtggacggcgtggaagtgcacaacgccaagaccaagcctagagaggaacagtacaacagcacctacagagtggtgtccgtgctgacagtgctgcaccaggattggctgaacggcaaagagtacaagtgcaaggtgtccaacaaggccctgcctgctcctatcgagaaaaccatcagcaaggccaagggccagcctcgcgaacctcaagtctgtacactgcctcctagccgcgacgaactgaccaagaaccaggtgtccctgagctgcgccgtgaagggcttttacccttccgatatcgccgtggaatgggagagcaatggccagcctgagaacaactacaagacaacccctcctgtgctggacagcgacggctcattcttcctggtgtccaagctgacagtggacaagagcagatggcagcagggcaacgtgttcagctgcagcgtgctgcatgaagccctgcacagccactacacccagaagtccctgtctctgagccccggcaagtgataa

SEQ ID NO: 296 - RNA, 1596 nt, synthetic construct
  source 1..1596: mol_type = other RNA
atggattggatttggagaatcctgttcctcgtgggcgccgctaccggagcccactcccaaggcagactgtttcagtctggcgccgaagtgaaaagaccaggcgcctctgtgcggatcagctgcagagctgacgacgacccctacaccgacgacgataccttcaccaagtactggacccactggatcagacaggcccctggacaaagacctgagtggctgggagtgatcagccctcacttcgccagacctatctacagctacaagttccgggacagactgaccctgaccagagacagctctctgaccgccgtgtacctggaactgaagggcctgcagcctgacgacagcggcatctacttttgcgccagagatcccttcggcgacagagcccctcactacaactaccacatggacgtgtggggcggaggcacagccgtgatagtgtcttccggcggaggtggaagtggtggtggcggtagcggaggcggtgggtccggaggtggtggatctgaagttgtgctgacacagagccctgccatcctgagtgtgtccccaggcgatagagtgatcctgtcctgcagagcctctcagggcctcgattcttctcacctggcctggtacagattcaagcggggacagatccccacactggtcatcttcggcaccagcaacagagccagaggcacccctgatagattttccggctctggcagcggagccgacttcaccctgacaatcagcagagtggaacccgaggacttcgccacctactactgccagagatacggcggcacccctatcacatttggcggcggaaccacactggacaagaaaggcggaggtggaagtggtggtggcggtagcggaggcggtgggtccggaggtggtggatctgaacctaagagcagcgacaagacccacacctgtcctccatgtcctgctccagaactgctggccggaccttccgtgttcctgtttcctccaaagcctaaggacaccctgatgatcagcagaacccctgaagtgacctgcgtggtggtggatgtgtctcacgaggaccctgaagtgaagttcaattggtacgtggacggcgtggaagtgcacaacgccaagaccaagcctagagaggaacagtacaacagcacctacagagtggtgtccgtgctgaccgtgctgcaccaggattggctgaacggcaaagagtacaagtgcaaggtgtccaacaaggccctgcctctgcctgaggaaaagaccatcagcaaggccaagggccagcctcgcgaacctcaagtctgtacactgcctcctagccgcgacgaactgaccaagaaccaggtgtccctgagctgcgccgtgaagggcttttacccttccgatatcgccgtggaatgggagagcaatggccagcctgagaacaactacaagacaacccctcctgtgctggacagcgacggctcattcttcctggtgtccaagctgacagtggacaagagcagatggcagcagggcaacgtgttcagctgcagcgtgctgcatgaagccctgcacagccactacacccagaagtccctgtctctgagccccggcaagtgataa

SEQ ID NO: 297 - RNA, 1596 nt, synthetic construct
  source 1..1596: mol_type = other RNA
atggattggatttggagaatcctgttcctcgtgggcgccgctaccggagcccactcccaaggcagactgtttcagtctggcgccgaagtgaaaagaccaggcgcctctgtgcggatcagctgcagagctgacgacgacccctacaccgacgacgataccttcaccaagtactggacccactggatcagacaggcccctggacaaagacctgagtggctgggagtgatcagccctcacttcgccagacctatctacagctacaagttccgggacagactgaccctgaccagagacagctctctgaccgccgtgtacctggaactgaagggcctgcagcctgacgacagcggcatctacttttgcgccagagatcccttcggcgacagagcccctcactacaactaccacatggacgtgtggggcggaggcacagccgtgatagtgtcttccggcggaggtggaagtggtggtggcggtagcggaggcggtgggtccggaggtggtggatctgaagttgtgctgacacagagccctgccatcctgagtgtgtccccaggcgatagagtgatcctgtcctgcagagcctctcagggcctcgattcttctcacctggcctggtacagattcaagcggggacagatccccacactggtcatcttcggcaccagcaacagagccagaggcacccctgatagattttccggctctggcagcggagccgacttcaccctgacaatcagcagagtggaacccgaggacttcgccacctactactgccagagatacggcggcacccctatcacatttggcggcggaaccacactggacaagaaaggcggaggtggaagtggtggtggcggtagcggaggcggtgggtccggaggtggtggatctgaacctaagagcagcgacaagacccacacctgtcctccatgtcctgctccagaactgctggccggaccttccgtgttcctgtttcctccaaagcctaaggacaccctgatgatcagcagaacccctgaagtgacctgcgtggtggtggatgtgtctcacgaggaccctgaagtgaagttcaattggtacgtggacggcgtggaagtgcacaacgccaagaccaagcctagagaggaacagtacaacagcacctacagagtggtgtccgtgctgaccgtgctgcaccaggattggctgaacggcaaagagtacaagtgcaaggtgtccaacaaggccctgcctgcccctgaggaaaagaccatcagcaaggccaagggccagcctcgcgaacctcaagtctgtacactgcctcctagccgcgacgaactgaccaagaaccaggtgtccctgagctgcgccgtgaagggcttttacccttccgatatcgccgtggaatgggagagcaatggccagcctgagaacaactacaagacaacccctcctgtgctggacagcgacggctcattcttcctggtgtccaagctgacagtggacaagagcagatggcagcagggcaacgtgttcagctgcagcgtgctgcatgaagccctgcacagccactacacccagaagtccctgtctctgagccccggcaagtgataa

SEQ ID NO: 298 - RNA, 1596 nt, synthetic construct
  source 1..1596: mol_type = other RNA
atggattggatttggagaatcctgttcctcgtgggcgccgctaccggagcccactcccaaggcagactgtttcagtctggcgccgaagtgaaaagaccaggcgcctctgtgcggatcagctgcagagctgacgacgacccctacaccgacgacgataccttcaccaagtactggacccactggatcagacaggcccctggacaaagacctgagtggctgggagtgatcagccctcacttcgccagacctatctacagctacaagttccgggacagactgaccctgaccagagacagctctctgaccgccgtgtacctggaactgaagggcctgcagcctgacgacagcggcatctacttttgcgccagagatcccttcggcgacagagcccctcactacaactaccacatggacgtgtggggcggaggcacagccgtgatagtgtcttccggcggaggtggaagtggtggtggcggtagcggaggcggtgggtccggaggtggtggatctgaagttgtgctgacacagagccctgccatcctgagtgtgtccccaggcgatagagtgatcctgtcctgcagagcctctcagggcctcgattcttctcacctggcctggtacagattcaagcggggacagatccccacactggtcatcttcggcaccagcaacagagccagaggcacccctgatagattttccggctctggcagcggagccgacttcaccctgacaatcagcagagtggaacccgaggacttcgccacctactactgccagagatacggcggcacccctatcacatttggcggcggaaccacactggacaagaaaggcggaggtggaagtggtggtggcggtagcggaggcggtgggtccggaggtggtggatctgaacctaagagcagcgacaagacccacacctgtcctccatgtcctgctccagaactgctggccggaccttccgtgttcctgtttcctccaaagcctaaggacaccctgatgatcagcagaacccctgaagtgacctgcgtggtggtggatgtgtctcacgaggaccctgaagtgaagttcaattggtacgtggacggcgtggaagtgcacaacgccaagaccaagcctagagaggaacagtacaacagcacctacagagtggtgtccgtgctgaccgtgctgcaccaggattggctgaacggcaaagagtacaagtgcaaggtgtccaacaaggccctgcctgcccctatcgaaaagaccatcagcaaggccaagggccagcctcgcgaacctcaagtctgtacactgcctcctagccgcgacgaactgaccaagaaccaggtgtccctgagctgcgccgtgaagggcttttacccttccgatatcgccgtggaatgggagagcaatggccagcctgagaacaactacaagacaacccctcctgtgctggacagcgacggctcattcttcctggtgtccaagctgacagtggacaagagcagatggcagcagggcaacgtgttcagctgcagcgtgctgcatgaagccctgcacagccactacacccagaagtccctgtctctgagccccggcaagtgataa

SEQ ID NO: 299 - RNA, 1596 nt, synthetic construct
  source 1..1596: mol_type = other RNA
atggattggatttggagaatcctgttcctcgtgggcgccgctaccggagcccactcccaaggcagactgtttcagtctggcgccgaagtgaaaagaccaggcgcctctgtgcggatcagctgcagagctgacgacgacccctacaccgacgacgataccttcaccaagtactggacccactggatcagacaggcccctggacaaagacctgagtggctgggagtgatcagccctcacttcgccagacctatctacagctacaagttccgggacagactgaccctgaccagagacagctctctgaccgccgtgtacctggaactgaagggcctgcagcctgacgacagcggcatctacttttgcgccagagatcccttcggcgacagagcccctcactacaactaccacatggacgtgtggggcggaggcacagccgtgatagtgtcttccggcggaggtggaagtggtggtggcggtagcggaggcggtgggtccggaggtggtggatctgaagttgtgctgacacagagccctgccatcctgagtgtgtccccaggcgatagagtgatcctgtcctgcagagcctctcagggcctcgattcttctcacctggcctggtacagattcaagcggggacagatccccacactggtcatcttcggcaccagcaacagagccagaggcacccctgatagattttccggctctggcagcggagccgacttcaccctgacaatcagcagagtggaacccgaggacttcgccacctactactgccagagatacggcggcacccctatcacatttggcggcggaaccacactggacaagaaaggcggaggtggaagtggtggtggcggtagcggaggcggtgggtccggaggtggtggatctgaacctaagagcagcgacaagacccacacctgtcctccatgtcctgctccagaactgctgggcggaccttccgtgttcctgtttcctccaaagcctaaggacaccctgatgatcagcagaacccctgaagtgacctgcgtggtggtggatgtgtctcacgaggaccctgaagtgaagttcaattggtacgtggacggcgtggaagtgcacaacgccaagaccaagcctagagaggaacagtacaacagcacctacagagtggtgtccgtgctgaccgtgctgcaccaggattggctgaacggcaaagagtacaagtgcaaggtgtccaacaaggccctgcctgcccctgaggaaaagaccatcagcaaggccaagggccagcctcgcgaacctcaagtctgtacactgcctcctagccgcgacgaactgaccaagaaccaggtgtccctgagctgcgccgtgaagggcttttacccttccgatatcgccgtggaatgggagagcaatggccagcctgagaacaactacaagacaacccctcctgtgctggacagcgacggctcattcttcctggtgtccaagctgacagtggacaagagcagatggcagcagggcaacgtgttcagctgcagcgtgctgcatgaagccctgcacagccactacacccagaagtccctgtctctgagccccggcaagtgataa

SEQ ID NO: 300 - RNA, 1596 nt, synthetic construct
  source 1..1596: mol_type = other RNA
atggattggatttggagaatcctgttcctcgtgggcgccgctaccggagcccactcccaaggcagactgtttcagtctggcgccgaagtgaaaagaccaggcgcctctgtgcggatcagctgcagagctgacgacgacccctacaccgacgacgataccttcaccaagtactggacccactggatcagacaggcccctggacaaagacctgagtggctgggagtgatcagccctcacttcgccagacctatctacagctacaagttccgggacagactgaccctgaccagagacagctctctgaccgccgtgtacctggaactgaagggcctgcagcctgacgacagcggcatctacttttgcgccagagatcccttcggcgacagagcccctcactacaactaccacatggacgtgtggggcggaggcacagccgtgatagtgtcttccggcggaggtggaagtggtggtggcggtagcggaggcggtgggtccggaggtggtggatctgaagttgtgctgacacagagccctgccatcctgagtgtgtccccaggcgatagagtgatcctgtcctgcagagcctctcagggcctcgattcttctcacctggcctggtacagattcaagcggggacagatccccacactggtcatcttcggcaccagcaacagagccagaggcacccctgatagattttccggctctggcagcggagccgacttcaccctgacaatcagcagagtggaacccgaggacttcgccacctactactgccagagatacggcggcacccctatcacatttggcggcggaaccacactggacaagaaaggcggaggtggaagtggtggtggcggtagcggaggcggtgggtccggaggtggtggatctgaacctaagagcagcgacaagacccacacctgtcctccatgtcctgctccagaactgctcggcggaccttccgtgttcctgtttcctccaaagcctaaggacaccctgatgatcagcagaacccctgaagtgacctgcgtggtggtggatgtgtctcacgaggacccagaagtgaagttcaattggtacgtggacggcgtggaagtgcacaacgccaagaccaagcctagagaggaacagtacaacagcacctacagagtggtgtccgtgctgacagtgctgcaccaggattggctgaacggcaaagagtacaagtgcaaggtgtccaacaaggccctgcctgctcctatcgagaaaaccatcagcaaggccaagggccagcctagggaaccccaggtttacaccctgcctccatgccgcgacgaactgaccaagaaccaggtgtccctgtggtgcctggtcaagggcttctacccttccgatatcgccgtggaatgggagagcaatggccagcctgagaacaactacaagacaacccctcctgtgctggacagcgacggctcattcttcctgtacagcaagctgacagtggacaagagcagatggcagcagggcaacgtgttcagctgcagcgtgctgcatgaagccctgcacagccactacacccagaagtccctgtctctgagccccggcaagtgataa

SEQ ID NO: 301 - RNA, 1596 nt, synthetic construct
  source 1..1596: mol_type = other RNA
atggattggatttggagaatcctgttcctcgtgggcgccgctaccggagcccactcccaaggcagactgtttcagtctggcgccgaagtgaaaagaccaggcgcctctgtgcggatcagctgcagagctgacgacgacccctacaccgacgacgataccttcaccaagtactggacccactggatcagacaggcccctggacaaagacctgagtggctgggagtgatcagccctcacttcgccagacctatctacagctacaagttccgggacagactgaccctgaccagagacagctctctgaccgccgtgtacctggaactgaagggcctgcagcctgacgacagcggcatctacttttgcgccagagatcccttcggcgacagagcccctcactacaactaccacatggacgtgtggggcggaggcacagccgtgatagtgtcttccggcggaggtggaagtggtggtggcggtagcggaggcggtgggtccggaggtggtggatctgaagttgtgctgacacagagccctgccatcctgagtgtgtccccaggcgatagagtgatcctgtcctgcagagcctctcagggcctcgattcttctcacctggcctggtacagattcaagcggggacagatccccacactggtcatcttcggcaccagcaacagagccagaggcacccctgatagattttccggctctggcagcggagccgacttcaccctgacaatcagcagagtggaacccgaggacttcgccacctactactgccagagatacggcggcacccctatcacatttggcggcggaaccacactggacaagaaaggcggaggtggaagtggtggtggcggtagcggaggcggtgggtccggaggtggtggatctgaacctaagagcagcgacaagacccacacctgtcctccatgtcctgctccagaactgctggccggaccttccgtgttcctgtttcctccaaagcctaaggacaccctgatgatcagcagaacccctgaagtgacctgcgtggtggtggatgtgtctcacgaggaccctgaagtgaagttcaattggtacgtggacggcgtggaagtgcacaacgccaagaccaagcctagagaggaacagtacaacagcacctacagagtggtgtccgtgctgaccgtgctgcaccaggattggctgaacggcaaagagtacaagtgcaaggtgtccaacaaggccctgcctctgcctgaggaaaagaccatcagcaaggccaagggccagcctagggaaccccaggtttacaccctgcctccatgccgcgacgaactgaccaagaaccaggtgtccctgtggtgcctggtcaagggcttctacccttccgatatcgccgtggaatgggagagcaatggccagcctgagaacaactacaagacaacccctcctgtgctggacagcgacggctcattcttcctgtacagcaagctgacagtggacaagagcagatggcagcagggcaacgtgttcagctgcagcgtgctgcatgaagccctgcacagccactacacccagaagtccctgtctctgagccccggcaagtgataa

SEQ ID NO: 302 - RNA, 1596 nt, synthetic construct
  source 1..1596: mol_type = other RNA
atggattggatttggagaatcctgttcctcgtgggcgccgctaccggagcccactcccaaggcagactgtttcagtctggcgccgaagtgaaaagaccaggcgcctctgtgcggatcagctgcagagctgacgacgacccctacaccgacgacgataccttcaccaagtactggacccactggatcagacaggcccctggacaaagacctgagtggctgggagtgatcagccctcacttcgccagacctatctacagctacaagttccgggacagactgaccctgaccagagacagctctctgaccgccgtgtacctggaactgaagggcctgcagcctgacgacagcggcatctacttttgcgccagagatcccttcggcgacagagcccctcactacaactaccacatggacgtgtggggcggaggcacagccgtgatagtgtcttccggcggaggtggaagtggtggtggcggtagcggaggcggtgggtccggaggtggtggatctgaagttgtgctgacacagagccctgccatcctgagtgtgtccccaggcgatagagtgatcctgtcctgcagagcctctcagggcctcgattcttctcacctggcctggtacagattcaagcggggacagatccccacactggtcatcttcggcaccagcaacagagccagaggcacccctgatagattttccggctctggcagcggagccgacttcaccctgacaatcagcagagtggaacccgaggacttcgccacctactactgccagagatacggcggcacccctatcacatttggcggcggaaccacactggacaagaaaggcggaggtggaagtggtggtggcggtagcggaggcggtgggtccggaggtggtggatctgaacctaagagcagcgacaagacccacacctgtcctccatgtcctgctccagaactgctggccggaccttccgtgttcctgtttcctccaaagcctaaggacaccctgatgatcagcagaacccctgaagtgacctgcgtggtggtggatgtgtctcacgaggaccctgaagtgaagttcaattggtacgtggacggcgtggaagtgcacaacgccaagaccaagcctagagaggaacagtacaacagcacctacagagtggtgtccgtgctgaccgtgctgcaccaggattggctgaacggcaaagagtacaagtgcaaggtgtccaacaaggccctgcctgcccctgaggaaaagaccatcagcaaggccaagggccagcctagggaaccccaggtttacaccctgcctccatgccgcgacgaactgaccaagaaccaggtgtccctgtggtgcctggtcaagggcttctacccttccgatatcgccgtggaatgggagagcaatggccagcctgagaacaactacaagacaacccctcctgtgctggacagcgacggctcattcttcctgtacagcaagctgacagtggacaagagcagatggcagcagggcaacgtgttcagctgcagcgtgctgcatgaagccctgcacagccactacacccagaagtccctgtctctgagccccggcaagtgataa

SEQ ID NO: 303 - RNA, 1596 nt, synthetic construct
  source 1..1596: mol_type = other RNA
atggattggatttggagaatcctgttcctcgtgggcgccgctaccggagcccactcccaaggcagactgtttcagtctggcgccgaagtgaaaagaccaggcgcctctgtgcggatcagctgcagagctgacgacgacccctacaccgacgacgataccttcaccaagtactggacccactggatcagacaggcccctggacaaagacctgagtggctgggagtgatcagccctcacttcgccagacctatctacagctacaagttccgggacagactgaccctgaccagagacagctctctgaccgccgtgtacctggaactgaagggcctgcagcctgacgacagcggcatctacttttgcgccagagatcccttcggcgacagagcccctcactacaactaccacatggacgtgtggggcggaggcacagccgtgatagtgtcttccggcggaggtggaagtggtggtggcggtagcggaggcggtgggtccggaggtggtggatctgaagttgtgctgacacagagccctgccatcctgagtgtgtccccaggcgatagagtgatcctgtcctgcagagcctctcagggcctcgattcttctcacctggcctggtacagattcaagcggggacagatccccacactggtcatcttcggcaccagcaacagagccagaggcacccctgatagattttccggctctggcagcggagccgacttcaccctgacaatcagcagagtggaacccgaggacttcgccacctactactgccagagatacggcggcacccctatcacatttggcggcggaaccacactggacaagaaaggcggaggtggaagtggtggtggcggtagcggaggcggtgggtccggaggtggtggatctgaacctaagagcagcgacaagacccacacctgtcctccatgtcctgctccagaactgctggccggaccttccgtgttcctgtttcctccaaagcctaaggacaccctgatgatcagcagaacccctgaagtgacctgcgtggtggtggatgtgtctcacgaggaccctgaagtgaagttcaattggtacgtggacggcgtggaagtgcacaacgccaagaccaagcctagagaggaacagtacaacagcacctacagagtggtgtccgtgctgaccgtgctgcaccaggattggctgaacggcaaagagtacaagtgcaaggtgtccaacaaggccctgcctgcccctatcgaaaagaccatcagcaaggccaagggccagcctagggaaccccaggtttacaccctgcctccatgccgcgacgaactgaccaagaaccaggtgtccctgtggtgcctggtcaagggcttctacccttccgatatcgccgtggaatgggagagcaatggccagcctgagaacaactacaagacaacccctcctgtgctggacagcgacggctcattcttcctgtacagcaagctgacagtggacaagagcagatggcagcagggcaacgtgttcagctgcagcgtgctgcatgaagccctgcacagccactacacccagaagtccctgtctctgagccccggcaagtgataa

SEQ ID NO: 304 - RNA, 1596 nt, synthetic construct
  source 1..1596: mol_type = other RNA
atggattggatttggagaatcctgttcctcgtgggcgccgctaccggagcccactcccaaggcagactgtttcagtctggcgccgaagtgaaaagaccaggcgcctctgtgcggatcagctgcagagctgacgacgacccctacaccgacgacgataccttcaccaagtactggacccactggatcagacaggcccctggacaaagacctgagtggctgggagtgatcagccctcacttcgccagacctatctacagctacaagttccgggacagactgaccctgaccagagacagctctctgaccgccgtgtacctggaactgaagggcctgcagcctgacgacagcggcatctacttttgcgccagagatcccttcggcgacagagcccctcactacaactaccacatggacgtgtggggcggaggcacagccgtgatagtgtcttccggcggaggtggaagtggtggtggcggtagcggaggcggtgggtccggaggtggtggatctgaagttgtgctgacacagagccctgccatcctgagtgtgtccccaggcgatagagtgatcctgtcctgcagagcctctcagggcctcgattcttctcacctggcctggtacagattcaagcggggacagatccccacactggtcatcttcggcaccagcaacagagccagaggcacccctgatagattttccggctctggcagcggagccgacttcaccctgacaatcagcagagtggaacccgaggacttcgccacctactactgccagagatacggcggcacccctatcacatttggcggcggaaccacactggacaagaaaggcggaggtggaagtggtggtggcggtagcggaggcggtgggtccggaggtggtggatctgaacctaagagcagcgacaagacccacacctgtcctccatgtcctgctccagaactgctgggcggaccttccgtgttcctgtttcctccaaagcctaaggacaccctgatgatcagcagaacccctgaagtgacctgcgtggtggtggatgtgtctcacgaggaccctgaagtgaagttcaattggtacgtggacggcgtggaagtgcacaacgccaagaccaagcctagagaggaacagtacaacagcacctacagagtggtgtccgtgctgaccgtgctgcaccaggattggctgaacggcaaagagtacaagtgcaaggtgtccaacaaggccctgcctgcccctgaggaaaagaccatcagcaaggccaagggccagcctagggaaccccaggtttacaccctgcctccatgccgcgacgaactgaccaagaaccaggtgtccctgtggtgcctggtcaagggcttctacccttccgatatcgccgtggaatgggagagcaatggccagcctgagaacaactacaagacaacccctcctgtgctggacagcgacggctcattcttcctgtacagcaagctgacagtggacaagagcagatggcagcagggcaacgtgttcagctgcagcgtgctgcatgaagccctgcacagccactacacccagaagtccctgtctctgagccccggcaagtgataa

SEQ ID NO: 305 - RNA, 1596 nt, synthetic construct
  source 1..1596: mol_type = other RNA
atggattggatttggagaatcctgttcctcgtgggcgccgctaccggagcccactccgaagtggtgctgacacagagccccgccatcctgagtgttagccctggcgatagagtgatcctgagctgcagagcctctcagggcctcgattcttctcacctggcctggtacagattcaagcggggacagatccccacactggtcatcttcggcaccagcaacagagccagaggcacccctgatagattttccggctctggcagcggagccgacttcaccctgacaatcagcagagtggaacccgaggacttcgccacctactactgccagagatacggcggcacccctatcacatttggcggcggaaccacactggacaagaaaggcggaggtggaagtggtggtggcggtagcggaggcggtgggtccggaggtggtggatctcaaggcagactgtttcagtctggcgccgaagtgaaaagaccaggcgcctctgtgcggatcagctgtagagccgacgacgacccctacaccgacgatgacaccttcaccaagtactggacccactggatcagacaggcccctggacaaagacctgagtggctgggagtgatcagccctcacttcgccagacctatctacagctacaagttccgggacagactgaccctgaccagagacagctctctgaccgccgtgtacctggaactgaagggcctgcagcctgacgacagcggcatctacttttgcgccagagatcccttcggcgacagggctccccactacaactaccacatggatgtgtggggaggcggcacagccgtgattgtgtcttccggcggcggaggaagcggaggcggaggttctggtggcggaggctcaggcggtggcggatctgaacctaagagcagcgacaagacccacacctgtcctccatgtcctgctccagaactgctcggcggaccttccgtgttcctgtttcctccaaagcctaaggacaccctgatgatcagcagaacccctgaagtgacctgcgtggtggtggatgtgtctcacgaggacccagaagtgaagttcaattggtacgtggacggcgtggaagtgcacaacgccaagaccaagcctagagaggaacagtacaacagcacctacagagtggtgtccgtgctgacagtgctgcaccaggattggctgaacggcaaagagtacaagtgcaaggtgtccaacaaggccctgcctgctcctatcgagaaaaccatcagcaaggccaagggccagcctagggaaccccaggtttacacactgcctccaagccgcgaggaaatgaccaagaaccaggtgtccctgacctgcctcgtgaagggcttctacccttccgatatcgccgtggaatgggagagcaatggccagcctgagaacaactacaagacaacccctcctgtgctggacagcgacggctcattcttcctgtacagcaagctgactgtggataagtcccggtggcagcagggcaacgtgttcagctgttctgtgatgcacgaagccctgcacaaccactacacccagaaaagcctgtctctgagccccggcaagtgataa

SEQ ID NO: 306 - RNA, 1596 nt, synthetic construct
  source 1..1596: mol_type = other RNA
atggattggatttggagaatcctgttcctcgtgggcgccgctaccggagcccactccgaagtggtgctgacacagagccccgccatcctgagtgttagccctggcgatagagtgatcctgagctgcagagcctctcagggcctcgattcttctcacctggcctggtacagattcaagcggggacagatccccacactggtcatcttcggcaccagcaacagagccagaggcacccctgatagattttccggctctggcagcggagccgacttcaccctgacaatcagcagagtggaacccgaggacttcgccacctactactgccagagatacggcggcacccctatcacatttggcggcggaaccacactggacaagaaaggcggaggtggaagtggtggtggcggtagcggaggcggtgggtccggaggtggtggatctcaaggcagactgtttcagtctggcgccgaagtgaaaagaccaggcgcctctgtgcggatcagctgtagagccgacgacgacccctacaccgacgatgacaccttcaccaagtactggacccactggatcagacaggcccctggacaaagacctgagtggctgggagtgatcagccctcacttcgccagacctatctacagctacaagttccgggacagactgaccctgaccagagacagctctctgaccgccgtgtacctggaactgaagggcctgcagcctgacgacagcggcatctacttttgcgccagagatcccttcggcgacagggctccccactacaactaccacatggatgtgtggggaggcggcacagccgtgattgtgtcttccggcggcggaggaagcggaggcggaggttctggtggcggaggctcaggcggtggcggatctgaacctaagagcagcgacaagacccacacctgtcctccatgtcctgctccagaactgctcggcggaccttccgtgttcctgtttcctccaaagcctaaggacaccctgatgatcagcagaacccctgaagtgacctgcgtggtggtggatgtgtctcacgaggacccagaagtgaagttcaattggtacgtggacggcgtggaagtgcacaacgccaagaccaagcctagagaggaacagtacaacagcacctacagagtggtgtccgtgctgacagtgctgcaccaggattggctgaacggcaaagagtacaagtgcaaggtgtccaacaaggccctgcctgctcctatcgagaaaaccatcagcaaggccaagggccagcctagggaaccccaggtttacacactgcctccaagccgcgaggaaatgaccaagaaccaggtgtccctgacctgcctcgtgaagggcttctacccttccgatatcgccgtggaatgggagagcaatggccagcctgagaacaactacaagacaacccctcctgtgctggacagcgacggctcattcttcctgtacagcaagctgaccgtggacaagtccagatggcagcagggcaacgtgttcagctgtagcgtgctgcacgaagccctgcacagccactacacccagaaaagcctgtctctgagccccggcaaatgataa

SEQ ID NO: 307 - RNA, 1596 nt, synthetic construct
  source 1..1596: mol_type = other RNA
atggattggatttggagaatcctgttcctcgtgggcgccgctaccggagcccactccgaagtggtgctgacacagagccccgccatcctgagtgttagccctggcgatagagtgatcctgagctgcagagcctctcagggcctcgattcttctcacctggcctggtacagattcaagcggggacagatccccacactggtcatcttcggcaccagcaacagagccagaggcacccctgatagattttccggctctggcagcggagccgacttcaccctgacaatcagcagagtggaacccgaggacttcgccacctactactgccagagatacggcggcacccctatcacatttggcggcggaaccacactggacaagaaaggcggaggtggaagtggtggtggcggtagcggaggcggtgggtccggaggtggtggatctcaaggcagactgtttcagtctggcgccgaagtgaaaagaccaggcgcctctgtgcggatcagctgtagagccgacgacgacccctacaccgacgatgacaccttcaccaagtactggacccactggatcagacaggcccctggacaaagacctgagtggctgggagtgatcagccctcacttcgccagacctatctacagctacaagttccgggacagactgaccctgaccagagacagctctctgaccgccgtgtacctggaactgaagggcctgcagcctgacgacagcggcatctacttttgcgccagagatcccttcggcgacagggctccccactacaactaccacatggatgtgtggggaggcggcacagccgtgattgtgtcttccggcggcggaggaagcggaggcggaggttctggtggcggaggctcaggcggtggcggatctgaacctaagagcagcgacaagacccacacctgtcctccatgtcctgctccagaactgctggccggaccttccgtgttcctgtttcctccaaagcctaaggacaccctgatgatcagcagaacccctgaagtgacctgcgtggtggtggatgtgtctcacgaggaccctgaagtgaagttcaattggtacgtggacggcgtggaagtgcacaacgccaagaccaagcctagagaggaacagtacaacagcacctacagagtggtgtccgtgctgaccgtgctgcaccaggattggctgaacggcaaagagtacaagtgcaaggtgtccaacaaggccctgcctctgcctgaggaaaagaccatcagcaaggccaagggccagcctagggaaccccaggtttacacactgcctccaagccgcgaggaaatgaccaagaaccaggtgtccctgacctgcctcgtgaagggcttctacccttccgatatcgccgtggaatgggagagcaatggccagcctgagaacaactacaagacaacccctcctgtgctggacagcgacggctcattcttcctgtacagcaagctgaccgtggacaagtccagatggcagcagggcaacgtgttcagctgtagcgtgctgcacgaagccctgcacagccactacacccagaaaagcctgtctctgagccccggcaaatgataa

SEQ ID NO: 308 - RNA, 1596 nt, synthetic construct
  source 1..1596: mol_type = other RNA
atggattggatttggagaatcctgttcctcgtgggcgccgctaccggagcccactccgaagtggtgctgacacagagccccgccatcctgagtgttagccctggcgatagagtgatcctgagctgcagagcctctcagggcctcgattcttctcacctggcctggtacagattcaagcggggacagatccccacactggtcatcttcggcaccagcaacagagccagaggcacccctgatagattttccggctctggcagcggagccgacttcaccctgacaatcagcagagtggaacccgaggacttcgccacctactactgccagagatacggcggcacccctatcacatttggcggcggaaccacactggacaagaaaggcggaggtggaagtggtggtggcggtagcggaggcggtgggtccggaggtggtggatctcaaggcagactgtttcagtctggcgccgaagtgaaaagaccaggcgcctctgtgcggatcagctgtagagccgacgacgacccctacaccgacgatgacaccttcaccaagtactggacccactggatcagacaggcccctggacaaagacctgagtggctgggagtgatcagccctcacttcgccagacctatctacagctacaagttccgggacagactgaccctgaccagagacagctctctgaccgccgtgtacctggaactgaagggcctgcagcctgacgacagcggcatctacttttgcgccagagatcccttcggcgacagggctccccactacaactaccacatggatgtgtggggaggcggcacagccgtgattgtgtcttccggcggcggaggaagcggaggcggaggttctggtggcggaggctcaggcggtggcggatctgaacctaagagcagcgacaagacccacacctgtcctccatgtcctgctccagaactgctggccggaccttccgtgttcctgtttcctccaaagcctaaggacaccctgatgatcagcagaacccctgaagtgacctgcgtggtggtggatgtgtctcacgaggaccctgaagtgaagttcaattggtacgtggacggcgtggaagtgcacaacgccaagaccaagcctagagaggaacagtacaacagcacctacagagtggtgtccgtgctgaccgtgctgcaccaggattggctgaacggcaaagagtacaagtgcaaggtgtccaacaaggccctgcctgcccctgaggaaaagaccatcagcaaggccaagggccagcctagggaaccccaggtttacacactgcctccaagccgcgaggaaatgaccaagaaccaggtgtccctgacctgcctcgtgaagggcttctacccttccgatatcgccgtggaatgggagagcaatggccagcctgagaacaactacaagacaacccctcctgtgctggacagcgacggctcattcttcctgtacagcaagctgaccgtggacaagtccagatggcagcagggcaacgtgttcagctgtagcgtgctgcacgaagccctgcacagccactacacccagaaaagcctgtctctgagccccggcaaatgataa

SEQ ID NO: 309 - RNA, 1596 nt, synthetic construct
  source 1..1596: mol_type = other RNA
atggattggatttggagaatcctgttcctcgtgggcgccgctaccggagcccactccgaagtggtgctgacacagagccccgccatcctgagtgttagccctggcgatagagtgatcctgagctgcagagcctctcagggcctcgattcttctcacctggcctggtacagattcaagcggggacagatccccacactggtcatcttcggcaccagcaacagagccagaggcacccctgatagattttccggctctggcagcggagccgacttcaccctgacaatcagcagagtggaacccgaggacttcgccacctactactgccagagatacggcggcacccctatcacatttggcggcggaaccacactggacaagaaaggcggaggtggaagtggtggtggcggtagcggaggcggtgggtccggaggtggtggatctcaaggcagactgtttcagtctggcgccgaagtgaaaagaccaggcgcctctgtgcggatcagctgtagagccgacgacgacccctacaccgacgatgacaccttcaccaagtactggacccactggatcagacaggcccctggacaaagacctgagtggctgggagtgatcagccctcacttcgccagacctatctacagctacaagttccgggacagactgaccctgaccagagacagctctctgaccgccgtgtacctggaactgaagggcctgcagcctgacgacagcggcatctacttttgcgccagagatcccttcggcgacagggctccccactacaactaccacatggatgtgtggggaggcggcacagccgtgattgtgtcttccggcggcggaggaagcggaggcggaggttctggtggcggaggctcaggcggtggcggatctgaacctaagagcagcgacaagacccacacctgtcctccatgtcctgctccagaactgctggccggaccttccgtgttcctgtttcctccaaagcctaaggacaccctgatgatcagcagaacccctgaagtgacctgcgtggtggtggatgtgtctcacgaggaccctgaagtgaagttcaattggtacgtggacggcgtggaagtgcacaacgccaagaccaagcctagagaggaacagtacaacagcacctacagagtggtgtccgtgctgaccgtgctgcaccaggattggctgaacggcaaagagtacaagtgcaaggtgtccaacaaggccctgcctgcccctatcgaaaagaccatcagcaaggccaagggccagcctagggaaccccaggtttacacactgcctccaagccgcgaggaaatgaccaagaaccaggtgtccctgacctgcctcgtgaagggcttctacccttccgatatcgccgtggaatgggagagcaatggccagcctgagaacaactacaagacaacccctcctgtgctggacagcgacggctcattcttcctgtacagcaagctgaccgtggacaagtccagatggcagcagggcaacgtgttcagctgtagcgtgctgcacgaagccctgcacagccactacacccagaaaagcctgtctctgagccccggcaaatgataa

SEQ ID NO: 310 - RNA, 1596 nt, synthetic construct
  source 1..1596: mol_type = other RNA
atggattggatttggagaatcctgttcctcgtgggcgccgctaccggagcccactccgaagtggtgctgacacagagccccgccatcctgagtgttagccctggcgatagagtgatcctgagctgcagagcctctcagggcctcgattcttctcacctggcctggtacagattcaagcggggacagatccccacactggtcatcttcggcaccagcaacagagccagaggcacccctgatagattttccggctctggcagcggagccgacttcaccctgacaatcagcagagtggaacccgaggacttcgccacctactactgccagagatacggcggcacccctatcacatttggcggcggaaccacactggacaagaaaggcggaggtggaagtggtggtggcggtagcggaggcggtgggtccggaggtggtggatctcaaggcagactgtttcagtctggcgccgaagtgaaaagaccaggcgcctctgtgcggatcagctgtagagccgacgacgacccctacaccgacgatgacaccttcaccaagtactggacccactggatcagacaggcccctggacaaagacctgagtggctgggagtgatcagccctcacttcgccagacctatctacagctacaagttccgggacagactgaccctgaccagagacagctctctgaccgccgtgtacctggaactgaagggcctgcagcctgacgacagcggcatctacttttgcgccagagatcccttcggcgacagggctccccactacaactaccacatggatgtgtggggaggcggcacagccgtgattgtgtcttccggcggcggaggaagcggaggcggaggttctggtggcggaggctcaggcggtggcggatctgaacctaagagcagcgacaagacccacacctgtcctccatgtcctgctccagaactgctgggcggaccttccgtgttcctgtttcctccaaagcctaaggacaccctgatgatcagcagaacccctgaagtgacctgcgtggtggtggatgtgtctcacgaggaccctgaagtgaagttcaattggtacgtggacggcgtggaagtgcacaacgccaagaccaagcctagagaggaacagtacaacagcacctacagagtggtgtccgtgctgaccgtgctgcaccaggattggctgaacggcaaagagtacaagtgcaaggtgtccaacaaggccctgcctgcccctgaggaaaagaccatcagcaaggccaagggccagcctagggaaccccaggtttacacactgcctccaagccgcgaggaaatgaccaagaaccaggtgtccctgacctgcctcgtgaagggcttctacccttccgatatcgccgtggaatgggagagcaatggccagcctgagaacaactacaagacaacccctcctgtgctggacagcgacggctcattcttcctgtacagcaagctgaccgtggacaagtccagatggcagcagggcaacgtgttcagctgtagcgtgctgcacgaagccctgcacagccactacacccagaaaagcctgtctctgagccccggcaaatgataa

SEQ ID NO: 311 - RNA, 1596 nt, synthetic construct
  source 1..1596: mol_type = other RNA
atggattggatttggagaatcctgttcctcgtgggcgccgctaccggagcccactccgaagtggtgctgacacagagccccgccatcctgagtgttagccctggcgatagagtgatcctgagctgcagagcctctcagggcctcgattcttctcacctggcctggtacagattcaagcggggacagatccccacactggtcatcttcggcaccagcaacagagccagaggcacccctgatagattttccggctctggcagcggagccgacttcaccctgacaatcagcagagtggaacccgaggacttcgccacctactactgccagagatacggcggcacccctatcacatttggcggcggaaccacactggacaagaaaggcggaggtggaagtggtggtggcggtagcggaggcggtgggtccggaggtggtggatctcaaggcagactgtttcagtctggcgccgaagtgaaaagaccaggcgcctctgtgcggatcagctgtagagccgacgacgacccctacaccgacgatgacaccttcaccaagtactggacccactggatcagacaggcccctggacaaagacctgagtggctgggagtgatcagccctcacttcgccagacctatctacagctacaagttccgggacagactgaccctgaccagagacagctctctgaccgccgtgtacctggaactgaagggcctgcagcctgacgacagcggcatctacttttgcgccagagatcccttcggcgacagggctccccactacaactaccacatggatgtgtggggaggcggcacagccgtgattgtgtcttccggcggcggaggaagcggaggcggaggttctggtggcggaggctcaggcggtggcggatctgaacctaagagcagcgacaagacccacacctgtcctccatgtcctgctccagaactgctcggcggaccttccgtgttcctgtttcctccaaagcctaaggacaccctgatgatcagcagaacccctgaagtgacctgcgtggtggtggatgtgtctcacgaggacccagaagtgaagttcaattggtacgtggacggcgtggaagtgcacaacgccaagaccaagcctagagaggaacagtacaacagcacctacagagtggtgtccgtgctgacagtgctgcaccaggattggctgaacggcaaagagtacaagtgcaaggtgtccaacaaggccctgcctgctcctatcgagaaaaccatcagcaaggccaagggccagcctcgcgaacctcaagtctgtacactgcctcctagccgcgaggaaatgaccaagaaccaggtgtccctgagctgcgccgtgaagggcttttacccttccgatatcgccgtggaatgggagagcaatggccagcctgagaacaactacaagacaacccctcctgtgctggacagcgacggctcattcttcctggtgtccaagctgacagtggacaagagcagatggcagcagggcaacgtgttcagctgcagcgtgctgcatgaagccctgcacagccactacacccagaagtccctgtctctgagccccggcaagtgataa

SEQ ID NO: 312 - RNA, 1596 nt, synthetic construct
  source 1..1596: mol_type = other RNA
atggattggatttggagaatcctgttcctcgtgggcgccgctaccggagcccactccgaagtggtgctgacacagagccccgccatcctgagtgttagccctggcgatagagtgatcctgagctgcagagcctctcagggcctcgattcttctcacctggcctggtacagattcaagcggggacagatccccacactggtcatcttcggcaccagcaacagagccagaggcacccctgatagattttccggctctggcagcggagccgacttcaccctgacaatcagcagagtggaacccgaggacttcgccacctactactgccagagatacggcggcacccctatcacatttggcggcggaaccacactggacaagaaaggcggaggtggaagtggtggtggcggtagcggaggcggtgggtccggaggtggtggatctcaaggcagactgtttcagtctggcgccgaagtgaaaagaccaggcgcctctgtgcggatcagctgtagagccgacgacgacccctacaccgacgatgacaccttcaccaagtactggacccactggatcagacaggcccctggacaaagacctgagtggctgggagtgatcagccctcacttcgccagacctatctacagctacaagttccgggacagactgaccctgaccagagacagctctctgaccgccgtgtacctggaactgaagggcctgcagcctgacgacagcggcatctacttttgcgccagagatcccttcggcgacagggctccccactacaactaccacatggatgtgtggggaggcggcacagccgtgattgtgtcttccggcggcggaggaagcggaggcggaggttctggtggcggaggctcaggcggtggcggatctgaacctaagagcagcgacaagacccacacctgtcctccatgtcctgctccagaactgctggccggaccttccgtgttcctgtttcctccaaagcctaaggacaccctgatgatcagcagaacccctgaagtgacctgcgtggtggtggatgtgtctcacgaggaccctgaagtgaagttcaattggtacgtggacggcgtggaagtgcacaacgccaagaccaagcctagagaggaacagtacaacagcacctacagagtggtgtccgtgctgaccgtgctgcaccaggattggctgaacggcaaagagtacaagtgcaaggtgtccaacaaggccctgcctctgcctgaggaaaagaccatcagcaaggccaagggccagcctcgcgaacctcaagtctgtacactgcctcctagccgcgaggaaatgaccaagaaccaggtgtccctgagctgcgccgtgaagggcttttacccttccgatatcgccgtggaatgggagagcaatggccagcctgagaacaactacaagacaacccctcctgtgctggacagcgacggctcattcttcctggtgtccaagctgacagtggacaagagcagatggcagcagggcaacgtgttcagctgcagcgtgctgcatgaagccctgcacagccactacacccagaagtccctgtctctgagccccggcaagtgataa

SEQ ID NO: 313 - RNA, 1596 nt, synthetic construct
  source 1..1596: mol_type = other RNA
atggattggatttggagaatcctgttcctcgtgggcgccgctaccggagcccactccgaagtggtgctgacacagagccccgccatcctgagtgttagccctggcgatagagtgatcctgagctgcagagcctctcagggcctcgattcttctcacctggcctggtacagattcaagcggggacagatccccacactggtcatcttcggcaccagcaacagagccagaggcacccctgatagattttccggctctggcagcggagccgacttcaccctgacaatcagcagagtggaacccgaggacttcgccacctactactgccagagatacggcggcacccctatcacatttggcggcggaaccacactggacaagaaaggcggaggtggaagtggtggtggcggtagcggaggcggtgggtccggaggtggtggatctcaaggcagactgtttcagtctggcgccgaagtgaaaagaccaggcgcctctgtgcggatcagctgtagagccgacgacgacccctacaccgacgatgacaccttcaccaagtactggacccactggatcagacaggcccctggacaaagacctgagtggctgggagtgatcagccctcacttcgccagacctatctacagctacaagttccgggacagactgaccctgaccagagacagctctctgaccgccgtgtacctggaactgaagggcctgcagcctgacgacagcggcatctacttttgcgccagagatcccttcggcgacagggctccccactacaactaccacatggatgtgtggggaggcggcacagccgtgattgtgtcttccggcggcggaggaagcggaggcggaggttctggtggcggaggctcaggcggtggcggatctgaacctaagagcagcgacaagacccacacctgtcctccatgtcctgctccagaactgctggccggaccttccgtgttcctgtttcctccaaagcctaaggacaccctgatgatcagcagaacccctgaagtgacctgcgtggtggtggatgtgtctcacgaggaccctgaagtgaagttcaattggtacgtggacggcgtggaagtgcacaacgccaagaccaagcctagagaggaacagtacaacagcacctacagagtggtgtccgtgctgaccgtgctgcaccaggattggctgaacggcaaagagtacaagtgcaaggtgtccaacaaggccctgcctgcccctgaggaaaagaccatcagcaaggccaagggccagcctcgcgaacctcaagtctgtacactgcctcctagccgcgaggaaatgaccaagaaccaggtgtccctgagctgcgccgtgaagggcttttacccttccgatatcgccgtggaatgggagagcaatggccagcctgagaacaactacaagacaacccctcctgtgctggacagcgacggctcattcttcctggtgtccaagctgacagtggacaagagcagatggcagcagggcaacgtgttcagctgcagcgtgctgcatgaagccctgcacagccactacacccagaagtccctgtctctgagccccggcaagtgataa

SEQ ID NO: 314 - RNA, 1596 nt, synthetic construct
  source 1..1596: mol_type = other RNA
atggattggatttggagaatcctgttcctcgtgggcgccgctaccggagcccactccgaagtggtgctgacacagagccccgccatcctgagtgttagccctggcgatagagtgatcctgagctgcagagcctctcagggcctcgattcttctcacctggcctggtacagattcaagcggggacagatccccacactggtcatcttcggcaccagcaacagagccagaggcacccctgatagattttccggctctggcagcggagccgacttcaccctgacaatcagcagagtggaacccgaggacttcgccacctactactgccagagatacggcggcacccctatcacatttggcggcggaaccacactggacaagaaaggcggaggtggaagtggtggtggcggtagcggaggcggtgggtccggaggtggtggatctcaaggcagactgtttcagtctggcgccgaagtgaaaagaccaggcgcctctgtgcggatcagctgtagagccgacgacgacccctacaccgacgatgacaccttcaccaagtactggacccactggatcagacaggcccctggacaaagacctgagtggctgggagtgatcagccctcacttcgccagacctatctacagctacaagttccgggacagactgaccctgaccagagacagctctctgaccgccgtgtacctggaactgaagggcctgcagcctgacgacagcggcatctacttttgcgccagagatcccttcggcgacagggctccccactacaactaccacatggatgtgtggggaggcggcacagccgtgattgtgtcttccggcggcggaggaagcggaggcggaggttctggtggcggaggctcaggcggtggcggatctgaacctaagagcagcgacaagacccacacctgtcctccatgtcctgctccagaactgctggccggaccttccgtgttcctgtttcctccaaagcctaaggacaccctgatgatcagcagaacccctgaagtgacctgcgtggtggtggatgtgtctcacgaggaccctgaagtgaagttcaattggtacgtggacggcgtggaagtgcacaacgccaagaccaagcctagagaggaacagtacaacagcacctacagagtggtgtccgtgctgaccgtgctgcaccaggattggctgaacggcaaagagtacaagtgcaaggtgtccaacaaggccctgcctgcccctatcgaaaagaccatcagcaaggccaagggccagcctcgcgaacctcaagtctgtacactgcctcctagccgcgaggaaatgaccaagaaccaggtgtccctgagctgcgccgtgaagggcttttacccttccgatatcgccgtggaatgggagagcaatggccagcctgagaacaactacaagacaacccctcctgtgctggacagcgacggctcattcttcctggtgtccaagctgacagtggacaagagcagatggcagcagggcaacgtgttcagctgcagcgtgctgcatgaagccctgcacagccactacacccagaagtccctgtctctgagccccggcaagtgataa

SEQ ID NO: 315 - RNA, 1596 nt, synthetic construct
  source 1..1596: mol_type = other RNA
atggattggatttggagaatcctgttcctcgtgggcgccgctaccggagcccactccgaagtggtgctgacacagagccccgccatcctgagtgttagccctggcgatagagtgatcctgagctgcagagcctctcagggcctcgattcttctcacctggcctggtacagattcaagcggggacagatccccacactggtcatcttcggcaccagcaacagagccagaggcacccctgatagattttccggctctggcagcggagccgacttcaccctgacaatcagcagagtggaacccgaggacttcgccacctactactgccagagatacggcggcacccctatcacatttggcggcggaaccacactggacaagaaaggcggaggtggaagtggtggtggcggtagcggaggcggtgggtccggaggtggtggatctcaaggcagactgtttcagtctggcgccgaagtgaaaagaccaggcgcctctgtgcggatcagctgtagagccgacgacgacccctacaccgacgatgacaccttcaccaagtactggacccactggatcagacaggcccctggacaaagacctgagtggctgggagtgatcagccctcacttcgccagacctatctacagctacaagttccgggacagactgaccctgaccagagacagctctctgaccgccgtgtacctggaactgaagggcctgcagcctgacgacagcggcatctacttttgcgccagagatcccttcggcgacagggctccccactacaactaccacatggatgtgtggggaggcggcacagccgtgattgtgtcttccggcggcggaggaagcggaggcggaggttctggtggcggaggctcaggcggtggcggatctgaacctaagagcagcgacaagacccacacctgtcctccatgtcctgctccagaactgctgggcggaccttccgtgttcctgtttcctccaaagcctaaggacaccctgatgatcagcagaacccctgaagtgacctgcgtggtggtggatgtgtctcacgaggaccctgaagtgaagttcaattggtacgtggacggcgtggaagtgcacaacgccaagaccaagcctagagaggaacagtacaacagcacctacagagtggtgtccgtgctgaccgtgctgcaccaggattggctgaacggcaaagagtacaagtgcaaggtgtccaacaaggccctgcctgcccctgaggaaaagaccatcagcaaggccaagggccagcctcgcgaacctcaagtctgtacactgcctcctagccgcgaggaaatgaccaagaaccaggtgtccctgagctgcgccgtgaagggcttttacccttccgatatcgccgtggaatgggagagcaatggccagcctgagaacaactacaagacaacccctcctgtgctggacagcgacggctcattcttcctggtgtccaagctgacagtggacaagagcagatggcagcagggcaacgtgttcagctgcagcgtgctgcatgaagccctgcacagccactacacccagaagtccctgtctctgagccccggcaagtgataa

SEQ ID NO: 316 - RNA, 1596 nt, synthetic construct
  source 1..1596: mol_type = other RNA
atggattggatttggagaatcctgttcctcgtgggcgccgctaccggagcccactccgaagtggtgctgacacagagccccgccatcctgagtgttagccctggcgatagagtgatcctgagctgcagagcctctcagggcctcgattcttctcacctggcctggtacagattcaagcggggacagatccccacactggtcatcttcggcaccagcaacagagccagaggcacccctgatagattttccggctctggcagcggagccgacttcaccctgacaatcagcagagtggaacccgaggacttcgccacctactactgccagagatacggcggcacccctatcacatttggcggcggaaccacactggacaagaaaggcggaggtggaagtggtggtggcggtagcggaggcggtgggtccggaggtggtggatctcaaggcagactgtttcagtctggcgccgaagtgaaaagaccaggcgcctctgtgcggatcagctgtagagccgacgacgacccctacaccgacgatgacaccttcaccaagtactggacccactggatcagacaggcccctggacaaagacctgagtggctgggagtgatcagccctcacttcgccagacctatctacagctacaagttccgggacagactgaccctgaccagagacagctctctgaccgccgtgtacctggaactgaagggcctgcagcctgacgacagcggcatctacttttgcgccagagatcccttcggcgacagggctccccactacaactaccacatggatgtgtggggaggcggcacagccgtgattgtgtcttccggcggcggaggaagcggaggcggaggttctggtggcggaggctcaggcggtggcggatctgaacctaagagcagcgacaagacccacacctgtcctccatgtcctgctccagaactgctcggcggaccttccgtgttcctgtttcctccaaagcctaaggacaccctgatgatcagcagaacccctgaagtgacctgcgtggtggtggatgtgtctcacgaggacccagaagtgaagttcaattggtacgtggacggcgtggaagtgcacaacgccaagaccaagcctagagaggaacagtacaacagcacctacagagtggtgtccgtgctgacagtgctgcaccaggattggctgaacggcaaagagtacaagtgcaaggtgtccaacaaggccctgcctgctcctatcgagaaaaccatcagcaaggccaagggccagcctagggaaccccaggtttacaccctgcctccatgccgcgaggaaatgaccaagaaccaggtgtccctgtggtgcctggtcaagggcttctacccttccgatatcgccgtggaatgggagagcaatggccagcctgagaacaactacaagacaacccctcctgtgctggacagcgacggctcattcttcctgtacagcaagctgacagtggacaagagcagatggcagcagggcaacgtgttcagctgcagcgtgctgcatgaagccctgcacagccactacacccagaagtccctgtctctgagccccggcaagtgataa

SEQ ID NO: 317 - RNA, 1596 nt, synthetic construct
  source 1..1596: mol_type = other RNA
atggattggatttggagaatcctgttcctcgtgggcgccgctaccggagcccactccgaagtggtgctgacacagagccccgccatcctgagtgttagccctggcgatagagtgatcctgagctgcagagcctctcagggcctcgattcttctcacctggcctggtacagattcaagcggggacagatccccacactggtcatcttcggcaccagcaacagagccagaggcacccctgatagattttccggctctggcagcggagccgacttcaccctgacaatcagcagagtggaacccgaggacttcgccacctactactgccagagatacggcggcacccctatcacatttggcggcggaaccacactggacaagaaaggcggaggtggaagtggtggtggcggtagcggaggcggtgggtccggaggtggtggatctcaaggcagactgtttcagtctggcgccgaagtgaaaagaccaggcgcctctgtgcggatcagctgtagagccgacgacgacccctacaccgacgatgacaccttcaccaagtactggacccactggatcagacaggcccctggacaaagacctgagtggctgggagtgatcagccctcacttcgccagacctatctacagctacaagttccgggacagactgaccctgaccagagacagctctctgaccgccgtgtacctggaactgaagggcctgcagcctgacgacagcggcatctacttttgcgccagagatcccttcggcgacagggctccccactacaactaccacatggatgtgtggggaggcggcacagccgtgattgtgtcttccggcggcggaggaagcggaggcggaggttctggtggcggaggctcaggcggtggcggatctgaacctaagagcagcgacaagacccacacctgtcctccatgtcctgctccagaactgctggccggaccttccgtgttcctgtttcctccaaagcctaaggacaccctgatgatcagcagaacccctgaagtgacctgcgtggtggtggatgtgtctcacgaggaccctgaagtgaagttcaattggtacgtggacggcgtggaagtgcacaacgccaagaccaagcctagagaggaacagtacaacagcacctacagagtggtgtccgtgctgaccgtgctgcaccaggattggctgaacggcaaagagtacaagtgcaaggtgtccaacaaggccctgcctctgcctgaggaaaagaccatcagcaaggccaagggccagcctagggaaccccaggtttacaccctgcctccatgccgcgaggaaatgaccaagaaccaggtgtccctgtggtgcctggtcaagggcttctacccttccgatatcgccgtggaatgggagagcaatggccagcctgagaacaactacaagacaacccctcctgtgctggacagcgacggctcattcttcctgtacagcaagctgacagtggacaagagcagatggcagcagggcaacgtgttcagctgcagcgtgctgcatgaagccctgcacagccactacacccagaagtccctgtctctgagccccggcaagtgataa

SEQ ID NO: 318 - RNA, 1596 nt, synthetic construct
  source 1..1596: mol_type = other RNA
atggattggatttggagaatcctgttcctcgtgggcgccgctaccggagcccactccgaagtggtgctgacacagagccccgccatcctgagtgttagccctggcgatagagtgatcctgagctgcagagcctctcagggcctcgattcttctcacctggcctggtacagattcaagcggggacagatccccacactggtcatcttcggcaccagcaacagagccagaggcacccctgatagattttccggctctggcagcggagccgacttcaccctgacaatcagcagagtggaacccgaggacttcgccacctactactgccagagatacggcggcacccctatcacatttggcggcggaaccacactggacaagaaaggcggaggtggaagtggtggtggcggtagcggaggcggtgggtccggaggtggtggatctcaaggcagactgtttcagtctggcgccgaagtgaaaagaccaggcgcctctgtgcggatcagctgtagagccgacgacgacccctacaccgacgatgacaccttcaccaagtactggacccactggatcagacaggcccctggacaaagacctgagtggctgggagtgatcagccctcacttcgccagacctatctacagctacaagttccgggacagactgaccctgaccagagacagctctctgaccgccgtgtacctggaactgaagggcctgcagcctgacgacagcggcatctacttttgcgccagagatcccttcggcgacagggctccccactacaactaccacatggatgtgtggggaggcggcacagccgtgattgtgtcttccggcggcggaggaagcggaggcggaggttctggtggcggaggctcaggcggtggcggatctgaacctaagagcagcgacaagacccacacctgtcctccatgtcctgctccagaactgctggccggaccttccgtgttcctgtttcctccaaagcctaaggacaccctgatgatcagcagaacccctgaagtgacctgcgtggtggtggatgtgtctcacgaggaccctgaagtgaagttcaattggtacgtggacggcgtggaagtgcacaacgccaagaccaagcctagagaggaacagtacaacagcacctacagagtggtgtccgtgctgaccgtgctgcaccaggattggctgaacggcaaagagtacaagtgcaaggtgtccaacaaggccctgcctgcccctgaggaaaagaccatcagcaaggccaagggccagcctagggaaccccaggtttacaccctgcctccatgccgcgaggaaatgaccaagaaccaggtgtccctgtggtgcctggtcaagggcttctacccttccgatatcgccgtggaatgggagagcaatggccagcctgagaacaactacaagacaacccctcctgtgctggacagcgacggctcattcttcctgtacagcaagctgacagtggacaagagcagatggcagcagggcaacgtgttcagctgcagcgtgctgcatgaagccctgcacagccactacacccagaagtccctgtctctgagccccggcaagtgataa

SEQ ID NO: 319 - RNA, 1596 nt, synthetic construct
  source 1..1596: mol_type = other RNA
atggattggatttggagaatcctgttcctcgtgggcgccgctaccggagcccactccgaagtggtgctgacacagagccccgccatcctgagtgttagccctggcgatagagtgatcctgagctgcagagcctctcagggcctcgattcttctcacctggcctggtacagattcaagcggggacagatccccacactggtcatcttcggcaccagcaacagagccagaggcacccctgatagattttccggctctggcagcggagccgacttcaccctgacaatcagcagagtggaacccgaggacttcgccacctactactgccagagatacggcggcacccctatcacatttggcggcggaaccacactggacaagaaaggcggaggtggaagtggtggtggcggtagcggaggcggtgggtccggaggtggtggatctcaaggcagactgtttcagtctggcgccgaagtgaaaagaccaggcgcctctgtgcggatcagctgtagagccgacgacgacccctacaccgacgatgacaccttcaccaagtactggacccactggatcagacaggcccctggacaaagacctgagtggctgggagtgatcagccctcacttcgccagacctatctacagctacaagttccgggacagactgaccctgaccagagacagctctctgaccgccgtgtacctggaactgaagggcctgcagcctgacgacagcggcatctacttttgcgccagagatcccttcggcgacagggctccccactacaactaccacatggatgtgtggggaggcggcacagccgtgattgtgtcttccggcggcggaggaagcggaggcggaggttctggtggcggaggctcaggcggtggcggatctgaacctaagagcagcgacaagacccacacctgtcctccatgtcctgctccagaactgctggccggaccttccgtgttcctgtttcctccaaagcctaaggacaccctgatgatcagcagaacccctgaagtgacctgcgtggtggtggatgtgtctcacgaggaccctgaagtgaagttcaattggtacgtggacggcgtggaagtgcacaacgccaagaccaagcctagagaggaacagtacaacagcacctacagagtggtgtccgtgctgaccgtgctgcaccaggattggctgaacggcaaagagtacaagtgcaaggtgtccaacaaggccctgcctgcccctatcgaaaagaccatcagcaaggccaagggccagcctagggaaccccaggtttacaccctgcctccatgccgcgaggaaatgaccaagaaccaggtgtccctgtggtgcctggtcaagggcttctacccttccgatatcgccgtggaatgggagagcaatggccagcctgagaacaactacaagacaacccctcctgtgctggacagcgacggctcattcttcctgtacagcaagctgacagtggacaagagcagatggcagcagggcaacgtgttcagctgcagcgtgctgcatgaagccctgcacagccactacacccagaagtccctgtctctgagccccggcaagtgataa

SEQ ID NO: 320 - RNA, 1596 nt, synthetic construct
  source 1..1596: mol_type = other RNA
atggattggatttggagaatcctgttcctcgtgggcgccgctaccggagcccactccgaagtggtgctgacacagagccccgccatcctgagtgttagccctggcgatagagtgatcctgagctgcagagcctctcagggcctcgattcttctcacctggcctggtacagattcaagcggggacagatccccacactggtcatcttcggcaccagcaacagagccagaggcacccctgatagattttccggctctggcagcggagccgacttcaccctgacaatcagcagagtggaacccgaggacttcgccacctactactgccagagatacggcggcacccctatcacatttggcggcggaaccacactggacaagaaaggcggaggtggaagtggtggtggcggtagcggaggcggtgggtccggaggtggtggatctcaaggcagactgtttcagtctggcgccgaagtgaaaagaccaggcgcctctgtgcggatcagctgtagagccgacgacgacccctacaccgacgatgacaccttcaccaagtactggacccactggatcagacaggcccctggacaaagacctgagtggctgggagtgatcagccctcacttcgccagacctatctacagctacaagttccgggacagactgaccctgaccagagacagctctctgaccgccgtgtacctggaactgaagggcctgcagcctgacgacagcggcatctacttttgcgccagagatcccttcggcgacagggctccccactacaactaccacatggatgtgtggggaggcggcacagccgtgattgtgtcttccggcggcggaggaagcggaggcggaggttctggtggcggaggctcaggcggtggcggatctgaacctaagagcagcgacaagacccacacctgtcctccatgtcctgctccagaactgctgggcggaccttccgtgttcctgtttcctccaaagcctaaggacaccctgatgatcagcagaacccctgaagtgacctgcgtggtggtggatgtgtctcacgaggaccctgaagtgaagttcaattggtacgtggacggcgtggaagtgcacaacgccaagaccaagcctagagaggaacagtacaacagcacctacagagtggtgtccgtgctgaccgtgctgcaccaggattggctgaacggcaaagagtacaagtgcaaggtgtccaacaaggccctgcctgcccctgaggaaaagaccatcagcaaggccaagggccagcctagggaaccccaggtttacaccctgcctccatgccgcgaggaaatgaccaagaaccaggtgtccctgtggtgcctggtcaagggcttctacccttccgatatcgccgtggaatgggagagcaatggccagcctgagaacaactacaagacaacccctcctgtgctggacagcgacggctcattcttcctgtacagcaagctgacagtggacaagagcagatggcagcagggcaacgtgttcagctgcagcgtgctgcatgaagccctgcacagccactacacccagaagtccctgtctctgagccccggcaagtgataa

SEQ ID NO: 321 - RNA, 1596 nt, synthetic construct; identical to SEQ ID NO: 305
  source 1..1596: mol_type = other RNA

SEQ ID NO: 322 - RNA, 1596 nt, synthetic construct; identical to SEQ ID NO: 306
  source 1..1596: mol_type = other RNA

SEQ ID NO: 323 - RNA, 1596 nt, synthetic construct; identical to SEQ ID NO: 307
  source 1..1596: mol_type = other RNA

SEQ ID NO: 324 - RNA, 1596 nt, synthetic construct; identical to SEQ ID NO: 308
  source 1..1596: mol_type = other RNA

SEQ ID NO: 325 - RNA, 1596 nt, synthetic construct; identical to SEQ ID NO: 309
  source 1..1596: mol_type = other RNA

SEQ ID NO: 326 - RNA, 1596 nt, synthetic construct; identical to SEQ ID NO: 310
  source 1..1596: mol_type = other RNA

SEQ ID NO: 327 - RNA, 1596 nt, synthetic construct; identical to SEQ ID NO: 311
  source 1..1596: mol_type = other RNA

SEQ ID NO: 328 - RNA, 1596 nt, synthetic construct; identical to SEQ ID NO: 312
  source 1..1596: mol_type = other RNA

SEQ ID NO: 329 - RNA, 1596 nt, synthetic construct; identical to SEQ ID NO: 313
  source 1..1596: mol_type = other RNA

SEQ ID NO: 330 - RNA, 1596 nt, synthetic construct; identical to SEQ ID NO: 314
  source 1..1596: mol_type = other RNA

SEQ ID NO: 331 - RNA, 1596 nt, synthetic construct; identical to SEQ ID NO: 315
  source 1..1596: mol_type = other RNA

SEQ ID NO: 332 - RNA, 1596 nt, synthetic construct; identical to SEQ ID NO: 316
  source 1..1596: mol_type = other RNA

SEQ ID NO: 333 - RNA, 1596 nt, synthetic construct; identical to SEQ ID NO: 317
  source 1..1596: mol_type = other RNA

SEQ ID NO: 334 - RNA, 1596 nt, synthetic construct; identical to SEQ ID NO: 318
  source 1..1596: mol_type = other RNA

SEQ ID NO: 335 - RNA, 1596 nt, synthetic construct; identical to SEQ ID NO: 319
  source 1..1596: mol_type = other RNA

SEQ ID NO: 336 - RNA, 1596 nt, synthetic construct; identical to SEQ ID NO: 320
  source 1..1596: mol_type = other RNA

SEQ ID NO: 337 - RNA, 1596 nt, synthetic construct
  source 1..1596: mol_type = other RNA
atggattggatttggagaatcctgttcctcgtgggcgccgctaccggagcccactccgaagtggtgctgacacagagccccgccatcctgagtgttagccctggcgatagagtgatcctgagctgcagagcctctcagggcctcgattcttctcacctggcctggtacagattcaagcggggacagatccccacactggtcatcttcggcaccagcaacagagccagaggcacccctgatagattttccggctctggcagcggagccgacttcaccctgacaatcagcagagtggaacccgaggacttcgccacctactactgccagagatacggcggcacccctatcacatttggcggcggaaccacactggacaagaaaggcggaggtggaagtggtggtggcggtagcggaggcggtgggtccggaggtggtggatctcaaggcagactgtttcagtctggcgccgaagtgaaaagaccaggcgcctctgtgcggatcagctgtagagccgacgacgacccctacaccgacgatgacaccttcaccaagtactggacccactggatcagacaggcccctggacaaagacctgagtggctgggagtgatcagccctcacttcgccagacctatctacagctacaagttccgggacagactgaccctgaccagagacagctctctgaccgccgtgtacctggaactgaagggcctgcagcctgacgacagcggcatctacttttgcgccagagatcccttcggcgacagggctccccactacaactaccacatggatgtgtggggaggcggcacagccgtgattgtgtcttccggcggcggaggaagcggaggcggaggttctggtggcggaggctcaggcggtggcggatctgaacctaagagcagcgacaagacccacacctgtcctccatgtcctgctccagaactgctcggcggaccttccgtgttcctgtttcctccaaagcctaaggacaccctgatgatcagcagaacccctgaagtgacctgcgtggtggtggatgtgtctcacgaggacccagaagtgaagttcaattggtacgtggacggcgtggaagtgcacaacgccaagaccaagcctagagaggaacagtacaacagcacctacagagtggtgtccgtgctgacagtgctgcaccaggattggctgaacggcaaagagtacaagtgcaaggtgtccaacaaggccctgcctgctcctatcgagaaaaccatcagcaaggccaagggccagcctagggaaccccaggtttacacactgcctccaagccgcgacgaactgaccaagaaccaggtgtccctgacctgcctcgtgaagggcttctacccttccgatatcgccgtggaatgggagagcaatggccagcctgagaacaactacaagacaacccctcctgtgctggacagcgacggctcattcttcctgtacagcaagctgactgtggataagtcccggtggcagcagggcaacgtgttcagctgttctgtgatgcacgaagccctgcacaaccactacacccagaaaagcctgtctctgagccccggcaagtgataa

SEQ ID NO: 338 - RNA, 1596 nt, synthetic construct
  source 1..1596: mol_type = other RNA
atggattggatttggagaatcctgttcctcgtgggcgccgctaccggagcccactccgaagtggtgctgacacagagccccgccatcctgagtgttagccctggcgatagagtgatcctgagctgcagagcctctcagggcctcgattcttctcacctggcctggtacagattcaagcggggacagatccccacactggtcatcttcggcaccagcaacagagccagaggcacccctgatagattttccggctctggcagcggagccgacttcaccctgacaatcagcagagtggaacccgaggacttcgccacctactactgccagagatacggcggcacccctatcacatttggcggcggaaccacactggacaagaaaggcggaggtggaagtggtggtggcggtagcggaggcggtgggtccggaggtggtggatctcaaggcagactgtttcagtctggcgccgaagtgaaaagaccaggcgcctctgtgcggatcagctgtagagccgacgacgacccctacaccgacgatgacaccttcaccaagtactggacccactggatcagacaggcccctggacaaagacctgagtggctgggagtgatcagccctcacttcgccagacctatctacagctacaagttccgggacagactgaccctgaccagagacagctctctgaccgccgtgtacctggaactgaagggcctgcagcctgacgacagcggcatctacttttgcgccagagatcccttcggcgacagggctccccactacaactaccacatggatgtgtggggaggcggcacagccgtgattgtgtcttccggcggcggaggaagcggaggcggaggttctggtggcggaggctcaggcggtggcggatctgaacctaagagcagcgacaagacccacacctgtcctccatgtcctgctccagaactgctcggcggaccttccgtgttcctgtttcctccaaagcctaaggacaccctgatgatcagcagaacccctgaagtgacctgcgtggtggtggatgtgtctcacgaggacccagaagtgaagttcaattggtacgtggacggcgtggaagtgcacaacgccaagaccaagcctagagaggaacagtacaacagcacctacagagtggtgtccgtgctgacagtgctgcaccaggattggctgaacggcaaagagtacaagtgcaaggtgtccaacaaggccctgcctgctcctatcgagaaaaccatcagcaaggccaagggccagcctagggaaccccaggtttacacactgcctccaagccgcgacgaactgaccaagaaccaggtgtccctgacctgcctcgtgaagggcttctacccttccgatatcgccgtggaatgggagagcaatggccagcctgagaacaactacaagacaacccctcctgtgctggacagcgacggctcattcttcctgtacagcaagctgaccgtggacaagtccagatggcagcagggcaacgtgttcagctgtagcgtgctgcacgaagccctgcacagccactacacccagaaaagcctgtctctgagccccggcaaatgataa

SEQ ID NO: 339 - RNA, 1596 nt, synthetic construct
  source 1..1596: mol_type = other RNA
atggattggatttggagaatcctgttcctcgtgggcgccgctaccggagcccactccgaagtggtgctgacacagagccccgccatcctgagtgttagccctggcgatagagtgatcctgagctgcagagcctctcagggcctcgattcttctcacctggcctggtacagattcaagcggggacagatccccacactggtcatcttcggcaccagcaacagagccagaggcacccctgatagattttccggctctggcagcggagccgacttcaccctgacaatcagcagagtggaacccgaggacttcgccacctactactgccagagatacggcggcacccctatcacatttggcggcggaaccacactggacaagaaaggcggaggtggaagtggtggtggcggtagcggaggcggtgggtccggaggtggtggatctcaaggcagactgtttcagtctggcgccgaagtgaaaagaccaggcgcctctgtgcggatcagctgtagagccgacgacgacccctacaccgacgatgacaccttcaccaagtactggacccactggatcagacaggcccctggacaaagacctgagtggctgggagtgatcagccctcacttcgccagacctatctacagctacaagttccgggacagactgaccctgaccagagacagctctctgaccgccgtgtacctggaactgaagggcctgcagcctgacgacagcggcatctacttttgcgccagagatcccttcggcgacagggctccccactacaactaccacatggatgtgtggggaggcggcacagccgtgattgtgtcttccggcggcggaggaagcggaggcggaggttctggtggcggaggctcaggcggtggcggatctgaacctaagagcagcgacaagacccacacctgtcctccatgtcctgctccagaactgctggccggaccttccgtgttcctgtttcctccaaagcctaaggacaccctgatgatcagcagaacccctgaagtgacctgcgtggtggtggatgtgtctcacgaggaccctgaagtgaagttcaattggtacgtggacggcgtggaagtgcacaacgccaagaccaagcctagagaggaacagtacaacagcacctacagagtggtgtccgtgctgaccgtgctgcaccaggattggctgaacggcaaagagtacaagtgcaaggtgtccaacaaggccctgcctctgcctgaggaaaagaccatcagcaaggccaagggccagcctagggaaccccaggtttacacactgcctccaagccgcgacgaactgaccaagaaccaggtgtccctgacctgcctcgtgaagggcttctacccttccgatatcgccgtggaatgggagagcaatggccagcctgagaacaactacaagacaacccctcctgtgctggacagcgacggctcattcttcctgtacagcaagctgaccgtggacaagtccagatggcagcagggcaacgtgttcagctgtagcgtgctgcacgaagccctgcacagccactacacccagaaaagcctgtctctgagccccggcaaatgataa

SEQ ID NO: 340 - RNA, 1596 nt, synthetic construct
  source 1..1596: mol_type = other RNA
atggattggatttggagaatcctgttcctcgtgggcgccgctaccggagcccactccgaagtggtgctgacacagagccccgccatcctgagtgttagccctggcgatagagtgatcctgagctgcagagcctctcagggcctcgattcttctcacctggcctggtacagattcaagcggggacagatccccacactggtcatcttcggcaccagcaacagagccagaggcacccctgatagattttccggctctggcagcggagccgacttcaccctgacaatcagcagagtggaacccgaggacttcgccacctactactgccagagatacggcggcacccctatcacatttggcggcggaaccacactggacaagaaaggcggaggtggaagtggtggtggcggtagcggaggcggtgggtccggaggtggtggatctcaaggcagactgtttcagtctggcgccgaagtgaaaagaccaggcgcctctgtgcggatcagctgtagagccgacgacgacccctacaccgacgatgacaccttcaccaagtactggacccactggatcagacaggcccctggacaaagacctgagtggctgggagtgatcagccctcacttcgccagacctatctacagctacaagttccgggacagactgaccctgaccagagacagctctctgaccgccgtgtacctggaactgaagggcctgcagcctgacgacagcggcatctacttttgcgccagagatcccttcggcgacagggctccccactacaactaccacatggatgtgtggggaggcggcacagccgtgattgtgtcttccggcggcggaggaagcggaggcggaggttctggtggcggaggctcaggcggtggcggatctgaacctaagagcagcgacaagacccacacctgtcctccatgtcctgctccagaactgctggccggaccttccgtgttcctgtttcctccaaagcctaaggacaccctgatgatcagcagaacccctgaagtgacctgcgtggtggtggatgtgtctcacgaggaccctgaagtgaagttcaattggtacgtggacggcgtggaagtgcacaacgccaagaccaagcctagagaggaacagtacaacagcacctacagagtggtgtccgtgctgaccgtgctgcaccaggattggctgaacggcaaagagtacaagtgcaaggtgtccaacaaggccctgcctgcccctgaggaaaagaccatcagcaaggccaagggccagcctagggaaccccaggtttacacactgcctccaagccgcgacgaactgaccaagaaccaggtgtccctgacctgcctcgtgaagggcttctacccttccgatatcgccgtggaatgggagagcaatggccagcctgagaacaactacaagacaacccctcctgtgctggacagcgacggctcattcttcctgtacagcaagctgaccgtggacaagtccagatggcagcagggcaacgtgttcagctgtagcgtgctgcacgaagccctgcacagccactacacccagaaaagcctgtctctgagccccggcaaatgataa

SEQ ID NO: 341 - RNA, 1596 nt, synthetic construct
  source 1..1596: mol_type = other RNA
atggattggatttggagaatcctgttcctcgtgggcgccgctaccggagcccactccgaagtggtgctgacacagagccccgccatcctgagtgttagccctggcgatagagtgatcctgagctgcagagcctctcagggcctcgattcttctcacctggcctggtacagattcaagcggggacagatccccacactggtcatcttcggcaccagcaacagagccagaggcacccctgatagattttccggctctggcagcggagccgacttcaccctgacaatcagcagagtggaacccgaggacttcgccacctactactgccagagatacggcggcacccctatcacatttggcggcggaaccacactggacaagaaaggcggaggtggaagtggtggtggcggtagcggaggcggtgggtccggaggtggtggatctcaaggcagactgtttcagtctggcgccgaagtgaaaagaccaggcgcctctgtgcggatcagctgtagagccgacgacgacccctacaccgacgatgacaccttcaccaagtactggacccactggatcagacaggcccctggacaaagacctgagtggctgggagtgatcagccctcacttcgccagacctatctacagctacaagttccgggacagactgaccctgaccagagacagctctctgaccgccgtgtacctggaactgaagggcctgcagcctgacgacagcggcatctacttttgcgccagagatcccttcggcgacagggctccccactacaactaccacatggatgtgtggggaggcggcacagccgtgattgtgtcttccggcggcggaggaagcggaggcggaggttctggtggcggaggctcaggcggtggcggatctgaacctaagagcagcgacaagacccacacctgtcctccatgtcctgctccagaactgctggccggaccttccgtgttcctgtttcctccaaagcctaaggacaccctgatgatcagcagaacccctgaagtgacctgcgtggtggtggatgtgtctcacgaggaccctgaagtgaagttcaattggtacgtggacggcgtggaagtgcacaacgccaagaccaagcctagagaggaacagtacaacagcacctacagagtggtgtccgtgctgaccgtgctgcaccaggattggctgaacggcaaagagtacaagtgcaaggtgtccaacaaggccctgcctgcccctatcgaaaagaccatcagcaaggccaagggccagcctagggaaccccaggtttacacactgcctccaagccgcgacgaactgaccaagaaccaggtgtccctgacctgcctcgtgaagggcttctacccttccgatatcgccgtggaatgggagagcaatggccagcctgagaacaactacaagacaacccctcctgtgctggacagcgacggctcattcttcctgtacagcaagctgaccgtggacaagtccagatggcagcagggcaacgtgttcagctgtagcgtgctgcacgaagccctgcacagccactacacccagaaaagcctgtctctgagccccggcaaatgataa

SEQ ID NO: 342 - RNA, 1596 nt, synthetic construct
  source 1..1596: mol_type = other RNA
atggattggatttggagaatcctgttcctcgtgggcgccgctaccggagcccactccgaagtggtgctgacacagagccccgccatcctgagtgttagccctggcgatagagtgatcctgagctgcagagcctctcagggcctcgattcttctcacctggcctggtacagattcaagcggggacagatccccacactggtcatcttcggcaccagcaacagagccagaggcacccctgatagattttccggctctggcagcggagccgacttcaccctgacaatcagcagagtggaacccgaggacttcgccacctactactgccagagatacggcggcacccctatcacatttggcggcggaaccacactggacaagaaaggcggaggtggaagtggtggtggcggtagcggaggcggtgggtccggaggtggtggatctcaaggcagactgtttcagtctggcgccgaagtgaaaagaccaggcgcctctgtgcggatcagctgtagagccgacgacgacccctacaccgacgatgacaccttcaccaagtactggacccactggatcagacaggcccctggacaaagacctgagtggctgggagtgatcagccctcacttcgccagacctatctacagctacaagttccgggacagactgaccctgaccagagacagctctctgaccgccgtgtacctggaactgaagggcctgcagcctgacgacagcggcatctacttttgcgccagagatcccttcggcgacagggctccccactacaactaccacatggatgtgtggggaggcggcacagccgtgattgtgtcttccggcggcggaggaagcggaggcggaggttctggtggcggaggctcaggcggtggcggatctgaacctaagagcagcgacaagacccacacctgtcctccatgtcctgctccagaactgctgggcggaccttccgtgttcctgtttcctccaaagcctaaggacaccctgatgatcagcagaacccctgaagtgacctgcgtggtggtggatgtgtctcacgaggaccctgaagtgaagttcaattggtacgtggacggcgtggaagtgcacaacgccaagaccaagcctagagaggaacagtacaacagcacctacagagtggtgtccgtgctgaccgtgctgcaccaggattggctgaacggcaaagagtacaagtgcaaggtgtccaacaaggccctgcctgcccctgaggaaaagaccatcagcaaggccaagggccagcctagggaaccccaggtttacacactgcctccaagccgcgacgaactgaccaagaaccaggtgtccctgacctgcctcgtgaagggcttctacccttccgatatcgccgtggaatgggagagcaatggccagcctgagaacaactacaagacaacccctcctgtgctggacagcgacggctcattcttcctgtacagcaagctgaccgtggacaagtccagatggcagcagggcaacgtgttcagctgtagcgtgctgcacgaagccctgcacagccactacacccagaaaagcctgtctctgagccccggcaaatgataa

SEQ ID NO: 343 - RNA, 1596 nt, synthetic construct
  source 1..1596: mol_type = other RNA
atggattggatttggagaatcctgttcctcgtgggcgccgctaccggagcccactccgaagtggtgctgacacagagccccgccatcctgagtgttagccctggcgatagagtgatcctgagctgcagagcctctcagggcctcgattcttctcacctggcctggtacagattcaagcggggacagatccccacactggtcatcttcggcaccagcaacagagccagaggcacccctgatagattttccggctctggcagcggagccgacttcaccctgacaatcagcagagtggaacccgaggacttcgccacctactactgccagagatacggcggcacccctatcacatttggcggcggaaccacactggacaagaaaggcggaggtggaagtggtggtggcggtagcggaggcggtgggtccggaggtggtggatctcaaggcagactgtttcagtctggcgccgaagtgaaaagaccaggcgcctctgtgcggatcagctgtagagccgacgacgacccctacaccgacgatgacaccttcaccaagtactggacccactggatcagacaggcccctggacaaagacctgagtggctgggagtgatcagccctcacttcgccagacctatctacagctacaagttccgggacagactgaccctgaccagagacagctctctgaccgccgtgtacctggaactgaagggcctgcagcctgacgacagcggcatctacttttgcgccagagatcccttcggcgacagggctccccactacaactaccacatggatgtgtggggaggcggcacagccgtgattgtgtcttccggcggcggaggaagcggaggcggaggttctggtggcggaggctcaggcggtggcggatctgaacctaagagcagcgacaagacccacacctgtcctccatgtcctgctccagaactgctcggcggaccttccgtgttcctgtttcctccaaagcctaaggacaccctgatgatcagcagaacccctgaagtgacctgcgtggtggtggatgtgtctcacgaggacccagaagtgaagttcaattggtacgtggacggcgtggaagtgcacaacgccaagaccaagcctagagaggaacagtacaacagcacctacagagtggtgtccgtgctgacagtgctgcaccaggattggctgaacggcaaagagtacaagtgcaaggtgtccaacaaggccctgcctgctcctatcgagaaaaccatcagcaaggccaagggccagcctcgcgaacctcaagtctgtacactgcctcctagccgcgacgaactgaccaagaaccaggtgtccctgagctgcgccgtgaagggcttttacccttccgatatcgccgtggaatgggagagcaatggccagcctgagaacaactacaagacaacccctcctgtgctggacagcgacggctcattcttcctggtgtccaagctgacagtggacaagagcagatggcagcagggcaacgtgttcagctgcagcgtgctgcatgaagccctgcacagccactacacccagaagtccctgtctctgagccccggcaagtgataa

SEQ ID NO: 344 - RNA, 1596 nt, synthetic construct
  source 1..1596: mol_type = other RNA
atggattggatttggagaatcctgttcctcgtgggcgccgctaccggagcccactccgaagtggtgctgacacagagccccgccatcctgagtgttagccctggcgatagagtgatcctgagctgcagagcctctcagggcctcgattcttctcacctggcctggtacagattcaagcggggacagatccccacactggtcatcttcggcaccagcaacagagccagaggcacccctgatagattttccggctctggcagcggagccgacttcaccctgacaatcagcagagtggaacccgaggacttcgccacctactactgccagagatacggcggcacccctatcacatttggcggcggaaccacactggacaagaaaggcggaggtggaagtggtggtggcggtagcggaggcggtgggtccggaggtggtggatctcaaggcagactgtttcagtctggcgccgaagtgaaaagaccaggcgcctctgtgcggatcagctgtagagccgacgacgacccctacaccgacgatgacaccttcaccaagtactggacccactggatcagacaggcccctggacaaagacctgagtggctgggagtgatcagccctcacttcgccagacctatctacagctacaagttccgggacagactgaccctgaccagagacagctctctgaccgccgtgtacctggaactgaagggcctgcagcctgacgacagcggcatctacttttgcgccagagatcccttcggcgacagggctccccactacaactaccacatggatgtgtggggaggcggcacagccgtgattgtgtcttccggcggcggaggaagcggaggcggaggttctggtggcggaggctcaggcggtggcggatctgaacctaagagcagcgacaagacccacacctgtcctccatgtcctgctccagaactgctggccggaccttccgtgttcctgtttcctccaaagcctaaggacaccctgatgatcagcagaacccctgaagtgacctgcgtggtggtggatgtgtctcacgaggaccctgaagtgaagttcaattggtacgtggacggcgtggaagtgcacaacgccaagaccaagcctagagaggaacagtacaacagcacctacagagtggtgtccgtgctgaccgtgctgcaccaggattggctgaacggcaaagagtacaagtgcaaggtgtccaacaaggccctgcctctgcctgaggaaaagaccatcagcaaggccaagggccagcctcgcgaacctcaagtctgtacactgcctcctagccgcgacgaactgaccaagaaccaggtgtccctgagctgcgccgtgaagggcttttacccttccgatatcgccgtggaatgggagagcaatggccagcctgagaacaactacaagacaacccctcctgtgctggacagcgacggctcattcttcctggtgtccaagctgacagtggacaagagcagatggcagcagggcaacgtgttcagctgcagcgtgctgcatgaagccctgcacagccactacacccagaagtccctgtctctgagccccggcaagtgataa

SEQ ID NO: 345 - RNA, 1596 nt, synthetic construct
  source 1..1596: mol_type = other RNA
atggattggatttggagaatcctgttcctcgtgggcgccgctaccggagcccactccgaagtggtgctgacacagagccccgccatcctgagtgttagccctggcgatagagtgatcctgagctgcagagcctctcagggcctcgattcttctcacctggcctggtacagattcaagcggggacagatccccacactggtcatcttcggcaccagcaacagagccagaggcacccctgatagattttccggctctggcagcggagccgacttcaccctgacaatcagcagagtggaacccgaggacttcgccacctactactgccagagatacggcggcacccctatcacatttggcggcggaaccacactggacaagaaaggcggaggtggaagtggtggtggcggtagcggaggcggtgggtccggaggtggtggatctcaaggcagactgtttcagtctggcgccgaagtgaaaagaccaggcgcctctgtgcggatcagctgtagagccgacgacgacccctacaccgacgatgacaccttcaccaagtactggacccactggatcagacaggcccctggacaaagacctgagtggctgggagtgatcagccctcacttcgccagacctatctacagctacaagttccgggacagactgaccctgaccagagacagctctctgaccgccgtgtacctggaactgaagggcctgcagcctgacgacagcggcatctacttttgcgccagagatcccttcggcgacagggctccccactacaactaccacatggatgtgtggggaggcggcacagccgtgattgtgtcttccggcggcggaggaagcggaggcggaggttctggtggcggaggctcaggcggtggcggatctgaacctaagagcagcgacaagacccacacctgtcctccatgtcctgctccagaactgctggccggaccttccgtgttcctgtttcctccaaagcctaaggacaccctgatgatcagcagaacccctgaagtgacctgcgtggtggtggatgtgtctcacgaggaccctgaagtgaagttcaattggtacgtggacggcgtggaagtgcacaacgccaagaccaagcctagagaggaacagtacaacagcacctacagagtggtgtccgtgctgaccgtgctgcaccaggattggctgaacggcaaagagtacaagtgcaaggtgtccaacaaggccctgcctgcccctgaggaaaagaccatcagcaaggccaagggccagcctcgcgaacctcaagtctgtacactgcctcctagccgcgacgaactgaccaagaaccaggtgtccctgagctgcgccgtgaagggcttttacccttccgatatcgccgtggaatgggagagcaatggccagcctgagaacaactacaagacaacccctcctgtgctggacagcgacggctcattcttcctggtgtccaagctgacagtggacaagagcagatggcagcagggcaacgtgttcagctgcagcgtgctgcatgaagccctgcacagccactacacccagaagtccctgtctctgagccccggcaagtgataa

SEQ ID NO: 346 - RNA, 1596 nt, synthetic construct
  source 1..1596: mol_type = other RNA
atggattggatttggagaatcctgttcctcgtgggcgccgctaccggagcccactccgaagtggtgctgacacagagccccgccatcctgagtgttagccctggcgatagagtgatcctgagctgcagagcctctcagggcctcgattcttctcacctggcctggtacagattcaagcggggacagatccccacactggtcatcttcggcaccagcaacagagccagaggcacccctgatagattttccggctctggcagcggagccgacttcaccctgacaatcagcagagtggaacccgaggacttcgccacctactactgccagagatacggcggcacccctatcacatttggcggcggaaccacactggacaagaaaggcggaggtggaagtggtggtggcggtagcggaggcggtgggtccggaggtggtggatctcaaggcagactgtttcagtctggcgccgaagtgaaaagaccaggcgcctctgtgcggatcagctgtagagccgacgacgacccctacaccgacgatgacaccttcaccaagtactggacccactggatcagacaggcccctggacaaagacctgagtggctgggagtgatcagccctcacttcgccagacctatctacagctacaagttccgggacagactgaccctgaccagagacagctctctgaccgccgtgtacctggaactgaagggcctgcagcctgacgacagcggcatctacttttgcgccagagatcccttcggcgacagggctccccactacaactaccacatggatgtgtggggaggcggcacagccgtgattgtgtcttccggcggcggaggaagcggaggcggaggttctggtggcggaggctcaggcggtggcggatctgaacctaagagcagcgacaagacccacacctgtcctccatgtcctgctccagaactgctggccggaccttccgtgttcctgtttcctccaaagcctaaggacaccctgatgatcagcagaacccctgaagtgacctgcgtggtggtggatgtgtctcacgaggaccctgaagtgaagttcaattggtacgtggacggcgtggaagtgcacaacgccaagaccaagcctagagaggaacagtacaacagcacctacagagtggtgtccgtgctgaccgtgctgcaccaggattggctgaacggcaaagagtacaagtgcaaggtgtccaacaaggccctgcctgcccctatcgaaaagaccatcagcaaggccaagggccagcctcgcgaacctcaagtctgtacactgcctcctagccgcgacgaactgaccaagaaccaggtgtccctgagctgcgccgtgaagggcttttacccttccgatatcgccgtggaatgggagagcaatggccagcctgagaacaactacaagacaacccctcctgtgctggacagcgacggctcattcttcctggtgtccaagctgacagtggacaagagcagatggcagcagggcaacgtgttcagctgcagcgtgctgcatgaagccctgcacagccactacacccagaagtccctgtctctgagccccggcaagtgataa

SEQ ID NO: 347 - RNA, 1596 nt, synthetic construct
  source 1..1596: mol_type = other RNA
atggattggatttggagaatcctgttcctcgtgggcgccgctaccggagcccactccgaagtggtgctgacacagagccccgccatcctgagtgttagccctggcgatagagtgatcctgagctgcagagcctctcagggcctcgattcttctcacctggcctggtacagattcaagcggggacagatccccacactggtcatcttcggcaccagcaacagagccagaggcacccctgatagattttccggctctggcagcggagccgacttcaccctgacaatcagcagagtggaacccgaggacttcgccacctactactgccagagatacggcggcacccctatcacatttggcggcggaaccacactggacaagaaaggcggaggtggaagtggtggtggcggtagcggaggcggtgggtccggaggtggtggatctcaaggcagactgtttcagtctggcgccgaagtgaaaagaccaggcgcctctgtgcggatcagctgtagagccgacgacgacccctacaccgacgatgacaccttcaccaagtactggacccactggatcagacaggcccctggacaaagacctgagtggctgggagtgatcagccctcacttcgccagacctatctacagctacaagttccgggacagactgaccctgaccagagacagctctctgaccgccgtgtacctggaactgaagggcctgcagcctgacgacagcggcatctacttttgcgccagagatcccttcggcgacagggctccccactacaactaccacatggatgtgtggggaggcggcacagccgtgattgtgtcttccggcggcggaggaagcggaggcggaggttctggtggcggaggctcaggcggtggcggatctgaacctaagagcagcgacaagacccacacctgtcctccatgtcctgctccagaactgctgggcggaccttccgtgttcctgtttcctccaaagcctaaggacaccctgatgatcagcagaacccctgaagtgacctgcgtggtggtggatgtgtctcacgaggaccctgaagtgaagttcaattggtacgtggacggcgtggaagtgcacaacgccaagaccaagcctagagaggaacagtacaacagcacctacagagtggtgtccgtgctgaccgtgctgcaccaggattggctgaacggcaaagagtacaagtgcaaggtgtccaacaaggccctgcctgcccctgaggaaaagaccatcagcaaggccaagggccagcctcgcgaacctcaagtctgtacactgcctcctagccgcgacgaactgaccaagaaccaggtgtccctgagctgcgccgtgaagggcttttacccttccgatatcgccgtggaatgggagagcaatggccagcctgagaacaactacaagacaacccctcctgtgctggacagcgacggctcattcttcctggtgtccaagctgacagtggacaagagcagatggcagcagggcaacgtgttcagctgcagcgtgctgcatgaagccctgcacagccactacacccagaagtccctgtctctgagccccggcaagtgataa

SEQ ID NO: 348 - RNA, 1596 nt, synthetic construct
  source 1..1596: mol_type = other RNA
atggattggatttggagaatcctgttcctcgtgggcgccgctaccggagcccactccgaagtggtgctgacacagagccccgccatcctgagtgttagccctggcgatagagtgatcctgagctgcagagcctctcagggcctcgattcttctcacctggcctggtacagattcaagcggggacagatccccacactggtcatcttcggcaccagcaacagagccagaggcacccctgatagattttccggctctggcagcggagccgacttcaccctgacaatcagcagagtggaacccgaggacttcgccacctactactgccagagatacggcggcacccctatcacatttggcggcggaaccacactggacaagaaaggcggaggtggaagtggtggtggcggtagcggaggcggtgggtccggaggtggtggatctcaaggcagactgtttcagtctggcgccgaagtgaaaagaccaggcgcctctgtgcggatcagctgtagagccgacgacgacccctacaccgacgatgacaccttcaccaagtactggacccactggatcagacaggcccctggacaaagacctgagtggctgggagtgatcagccctcacttcgccagacctatctacagctacaagttccgggacagactgaccctgaccagagacagctctctgaccgccgtgtacctggaactgaagggcctgcagcctgacgacagcggcatctacttttgcgccagagatcccttcggcgacagggctccccactacaactaccacatggatgtgtggggaggcggcacagccgtgattgtgtcttccggcggcggaggaagcggaggcggaggttctggtggcggaggctcaggcggtggcggatctgaacctaagagcagcgacaagacccacacctgtcctccatgtcctgctccagaactgctcggcggaccttccgtgttcctgtttcctccaaagcctaaggacaccctgatgatcagcagaacccctgaagtgacctgcgtggtggtggatgtgtctcacgaggacccagaagtgaagttcaattggtacgtggacggcgtggaagtgcacaacgccaagaccaagcctagagaggaacagtacaacagcacctacagagtggtgtccgtgctgacagtgctgcaccaggattggctgaacggcaaagagtacaagtgcaaggtgtccaacaaggccctgcctgctcctatcgagaaaaccatcagcaaggccaagggccagcctagggaaccccaggtttacaccctgcctccatgccgcgacgaactgaccaagaaccaggtgtccctgtggtgcctggtcaagggcttctacccttccgatatcgccgtggaatgggagagcaatggccagcctgagaacaactacaagacaacccctcctgtgctggacagcgacggctcattcttcctgtacagcaagctgacagtggacaagagcagatggcagcagggcaacgtgttcagctgcagcgtgctgcatgaagccctgcacagccactacacccagaagtccctgtctctgagccccggcaagtgataa

SEQ ID NO: 349 - RNA, 1596 nt, synthetic construct
  source 1..1596: mol_type = other RNA
atggattggatttggagaatcctgttcctcgtgggcgccgctaccggagcccactccgaagtggtgctgacacagagccccgccatcctgagtgttagccctggcgatagagtgatcctgagctgcagagcctctcagggcctcgattcttctcacctggcctggtacagattcaagcggggacagatccccacactggtcatcttcggcaccagcaacagagccagaggcacccctgatagattttccggctctggcagcggagccgacttcaccctgacaatcagcagagtggaacccgaggacttcgccacctactactgccagagatacggcggcacccctatcacatttggcggcggaaccacactggacaagaaaggcggaggtggaagtggtggtggcggtagcggaggcggtgggtccggaggtggtggatctcaaggcagactgtttcagtctggcgccgaagtgaaaagaccaggcgcctctgtgcggatcagctgtagagccgacgacgacccctacaccgacgatgacaccttcaccaagtactggacccactggatcagacaggcccctggacaaagacctgagtggctgggagtgatcagccctcacttcgccagacctatctacagctacaagttccgggacagactgaccctgaccagagacagctctctgaccgccgtgtacctggaactgaagggcctgcagcctgacgacagcggcatctacttttgcgccagagatcccttcggcgacagggctccccactacaactaccacatggatgtgtggggaggcggcacagccgtgattgtgtcttccggcggcggaggaagcggaggcggaggttctggtggcggaggctcaggcggtggcggatctgaacctaagagcagcgacaagacccacacctgtcctccatgtcctgctccagaactgctggccggaccttccgtgttcctgtttcctccaaagcctaaggacaccctgatgatcagcagaacccctgaagtgacctgcgtggtggtggatgtgtctcacgaggaccctgaagtgaagttcaattggtacgtggacggcgtggaagtgcacaacgccaagaccaagcctagagaggaacagtacaacagcacctacagagtggtgtccgtgctgaccgtgctgcaccaggattggctgaacggcaaagagtacaagtgcaaggtgtccaacaaggccctgcctctgcctgaggaaaagaccatcagcaaggccaagggccagcctagggaaccccaggtttacaccctgcctccatgccgcgacgaactgaccaagaaccaggtgtccctgtggtgcctggtcaagggcttctacccttccgatatcgccgtggaatgggagagcaatggccagcctgagaacaactacaagacaacccctcctgtgctggacagcgacggctcattcttcctgtacagcaagctgacagtggacaagagcagatggcagcagggcaacgtgttcagctgcagcgtgctgcatgaagccctgcacagccactacacccagaagtccctgtctctgagccccggcaagtgataa

SEQ ID NO: 350 - RNA, 1596 nt, synthetic construct
  source 1..1596: mol_type = other RNA
atggattggatttggagaatcctgttcctcgtgggcgccgctaccggagcccactccgaagtggtgctgacacagagccccgccatcctgagtgttagccctggcgatagagtgatcctgagctgcagagcctctcagggcctcgattcttctcacctggcctggtacagattcaagcggggacagatccccacactggtcatcttcggcaccagcaacagagccagaggcacccctgatagattttccggctctggcagcggagccgacttcaccctgacaatcagcagagtggaacccgaggacttcgccacctactactgccagagatacggcggcacccctatcacatttggcggcggaaccacactggacaagaaaggcggaggtggaagtggtggtggcggtagcggaggcggtgggtccggaggtggtggatctcaaggcagactgtttcagtctggcgccgaagtgaaaagaccaggcgcctctgtgcggatcagctgtagagccgacgacgacccctacaccgacgatgacaccttcaccaagtactggacccactggatcagacaggcccctggacaaagacctgagtggctgggagtgatcagccctcacttcgccagacctatctacagctacaagttccgggacagactgaccctgaccagagacagctctctgaccgccgtgtacctggaactgaagggcctgcagcctgacgacagcggcatctacttttgcgccagagatcccttcggcgacagggctccccactacaactaccacatggatgtgtggggaggcggcacagccgtgattgtgtcttccggcggcggaggaagcggaggcggaggttctggtggcggaggctcaggcggtggcggatctgaacctaagagcagcgacaagacccacacctgtcctccatgtcctgctccagaactgctggccggaccttccgtgttcctgtttcctccaaagcctaaggacaccctgatgatcagcagaacccctgaagtgacctgcgtggtggtggatgtgtctcacgaggaccctgaagtgaagttcaattggtacgtggacggcgtggaagtgcacaacgccaagaccaagcctagagaggaacagtacaacagcacctacagagtggtgtccgtgctgaccgtgctgcaccaggattggctgaacggcaaagagtacaagtgcaaggtgtccaacaaggccctgcctgcccctgaggaaaagaccatcagcaaggccaagggccagcctagggaaccccaggtttacaccctgcctccatgccgcgacgaactgaccaagaaccaggtgtccctgtggtgcctggtcaagggcttctacccttccgatatcgccgtggaatgggagagcaatggccagcctgagaacaactacaagacaacccctcctgtgctggacagcgacggctcattcttcctgtacagcaagctgacagtggacaagagcagatggcagcagggcaacgtgttcagctgcagcgtgctgcatgaagccctgcacagccactacacccagaagtccctgtctctgagccccggcaagtgataa

SEQ ID NO: 351 - RNA, 1596 nt, synthetic construct
  source 1..1596: mol_type = other RNA
atggattggatttggagaatcctgttcctcgtgggcgccgctaccggagcccactccgaagtggtgctgacacagagccccgccatcctgagtgttagccctggcgatagagtgatcctgagctgcagagcctctcagggcctcgattcttctcacctggcctggtacagattcaagcggggacagatccccacactggtcatcttcggcaccagcaacagagccagaggcacccctgatagattttccggctctggcagcggagccgacttcaccctgacaatcagcagagtggaacccgaggacttcgccacctactactgccagagatacggcggcacccctatcacatttggcggcggaaccacactggacaagaaaggcggaggtggaagtggtggtggcggtagcggaggcggtgggtccggaggtggtggatctcaaggcagactgtttcagtctggcgccgaagtgaaaagaccaggcgcctctgtgcggatcagctgtagagccgacgacgacccctacaccgacgatgacaccttcaccaagtactggacccactggatcagacaggcccctggacaaagacctgagtggctgggagtgatcagccctcacttcgccagacctatctacagctacaagttccgggacagactgaccctgaccagagacagctctctgaccgccgtgtacctggaactgaagggcctgcagcctgacgacagcggcatctacttttgcgccagagatcccttcggcgacagggctccccactacaactaccacatggatgtgtggggaggcggcacagccgtgattgtgtcttccggcggcggaggaagcggaggcggaggttctggtggcggaggctcaggcggtggcggatctgaacctaagagcagcgacaagacccacacctgtcctccatgtcctgctccagaactgctggccggaccttccgtgttcctgtttcctccaaagcctaaggacaccctgatgatcagcagaacccctgaagtgacctgcgtggtggtggatgtgtctcacgaggaccctgaagtgaagttcaattggtacgtggacggcgtggaagtgcacaacgccaagaccaagcctagagaggaacagtacaacagcacctacagagtggtgtccgtgctgaccgtgctgcaccaggattggctgaacggcaaagagtacaagtgcaaggtgtccaacaaggccctgcctgcccctatcgaaaagaccatcagcaaggccaagggccagcctagggaaccccaggtttacaccctgcctccatgccgcgacgaactgaccaagaaccaggtgtccctgtggtgcctggtcaagggcttctacccttccgatatcgccgtggaatgggagagcaatggccagcctgagaacaactacaagacaacccctcctgtgctggacagcgacggctcattcttcctgtacagcaagctgacagtggacaagagcagatggcagcagggcaacgtgttcagctgcagcgtgctgcatgaagccctgcacagccactacacccagaagtccctgtctctgagccccggcaagtgataa

SEQ ID NO: 352 - RNA, 1596 nt, synthetic construct
  source 1..1596: mol_type = other RNA
atggattggatttggagaatcctgttcctcgtgggcgccgctaccggagcccactccgaagtggtgctgacacagagccccgccatcctgagtgttagccctggcgatagagtgatcctgagctgcagagcctctcagggcctcgattcttctcacctggcctggtacagattcaagcggggacagatccccacactggtcatcttcggcaccagcaacagagccagaggcacccctgatagattttccggctctggcagcggagccgacttcaccctgacaatcagcagagtggaacccgaggacttcgccacctactactgccagagatacggcggcacccctatcacatttggcggcggaaccacactggacaagaaaggcggaggtggaagtggtggtggcggtagcggaggcggtgggtccggaggtggtggatctcaaggcagactgtttcagtctggcgccgaagtgaaaagaccaggcgcctctgtgcggatcagctgtagagccgacgacgacccctacaccgacgatgacaccttcaccaagtactggacccactggatcagacaggcccctggacaaagacctgagtggctgggagtgatcagccctcacttcgccagacctatctacagctacaagttccgggacagactgaccctgaccagagacagctctctgaccgccgtgtacctggaactgaagggcctgcagcctgacgacagcggcatctacttttgcgccagagatcccttcggcgacagggctccccactacaactaccacatggatgtgtggggaggcggcacagccgtgattgtgtcttccggcggcggaggaagcggaggcggaggttctggtggcggaggctcaggcggtggcggatctgaacctaagagcagcgacaagacccacacctgtcctccatgtcctgctccagaactgctgggcggaccttccgtgttcctgtttcctccaaagcctaaggacaccctgatgatcagcagaacccctgaagtgacctgcgtggtggtggatgtgtctcacgaggaccctgaagtgaagttcaattggtacgtggacggcgtggaagtgcacaacgccaagaccaagcctagagaggaacagtacaacagcacctacagagtggtgtccgtgctgaccgtgctgcaccaggattggctgaacggcaaagagtacaagtgcaaggtgtccaacaaggccctgcctgcccctgaggaaaagaccatcagcaaggccaagggccagcctagggaaccccaggtttacaccctgcctccatgccgcgacgaactgaccaagaaccaggtgtccctgtggtgcctggtcaagggcttctacccttccgatatcgccgtggaatgggagagcaatggccagcctgagaacaactacaagacaacccctcctgtgctggacagcgacggctcattcttcctgtacagcaagctgacagtggacaagagcagatggcagcagggcaacgtgttcagctgcagcgtgctgcatgaagccctgcacagccactacacccagaagtccctgtctctgagccccggcaagtgataa

SEQ ID NO: 353 - RNA, 1611 nt, synthetic construct
  source 1..1611: mol_type = other RNA
atggattggatttggagaatcctgttcctcgtgggcgccgctaccggagcccactcccaaggcagactgtttcagtctggcgccgaagtgaaaagaccaggcgcctctgtgcggatcagctgcagagctgacgacgacccctacaccgacgacgataccttcaccaagtactggacccactggatcagacaggcccctggacaaagacctgagtggctgggagtgatcagccctcacttcgccagacctatctacagctacaagttccgggacagactgaccctgaccagagacagctctctgaccgccgtgtacctggaactgaagggcctgcagcctgacgacagcggcatctacttttgcgccagagatcccttcggcgacagagcccctcactacaactaccacatggacgtgtggggcggaggcacagccgtgatagtgtcttccggcggcggaggaagcggaggcgggggttctggcggtggtggctctggtggcggaggctcaggcggtggcggatctgaagttgtgctgacacagagccctgccatcctgagtgtgtccccaggcgatagagtgatcctgtcctgcagagcctctcagggcctcgattcttctcacctggcctggtacagattcaagcggggacagatccccacactggtcatcttcggcaccagcaacagagccagaggcacccctgatagattttccggctctggcagcggagccgacttcaccctgacaatcagcagagtggaacccgaggacttcgccacctactactgccagagatacggcggcacccctatcacatttggcggcggaaccacactggacaagaaaggcggaggtggaagtggtggtggcggtagcggaggcggtgggtccggaggtggtggatctgaacctaagagcagcgacaagacccacacctgtcctccatgtcctgctccagaactgctcggcggaccttccgtgttcctgtttcctccaaagcctaaggacaccctgatgatcagcagaacccctgaagtgacctgcgtggtggtggatgtgtctcacgaggacccagaagtgaagttcaattggtacgtggacggcgtggaagtgcacaacgccaagaccaagcctagagaggaacagtacaacagcacctacagagtggtgtccgtgctgacagtgctgcaccaggattggctgaacggcaaagagtacaagtgcaaggtgtccaacaaggccctgcctgctcctatcgagaaaaccatcagcaaggccaagggccagcctagggaaccccaggtttacacactgcctccaagccgcgaggaaatgaccaagaaccaggtgtccctgacctgcctcgtgaagggcttctacccttccgatatcgccgtggaatgggagagcaatggccagcctgagaacaactacaagacaacccctcctgtgctggacagcgacggctcattcttcctgtacagcaagctgactgtggataagtcccggtggcagcagggcaacgtgttcagctgttctgtgatgcacgaagccctgcacaaccactacacccagaaaagcctgtctctgagccccggcaagtgataa

SEQ ID NO: 354 - RNA, 1611 nt, synthetic construct
  source 1..1611: mol_type = other RNA
atggattggatttggagaatcctgttcctcgtgggcgccgctaccggagcccactcccaaggcagactgtttcagtctggcgccgaagtgaaaagaccaggcgcctctgtgcggatcagctgcagagctgacgacgacccctacaccgacgacgataccttcaccaagtactggacccactggatcagacaggcccctggacaaagacctgagtggctgggagtgatcagccctcacttcgccagacctatctacagctacaagttccgggacagactgaccctgaccagagacagctctctgaccgccgtgtacctggaactgaagggcctgcagcctgacgacagcggcatctacttttgcgccagagatcccttcggcgacagagcccctcactacaactaccacatggacgtgtggggcggaggcacagccgtgatagtgtcttccggcggcggaggaagcggaggcgggggttctggcggtggtggctctggtggcggaggctcaggcggtggcggatctgaagttgtgctgacacagagccctgccatcctgagtgtgtccccaggcgatagagtgatcctgtcctgcagagcctctcagggcctcgattcttctcacctggcctggtacagattcaagcggggacagatccccacactggtcatcttcggcaccagcaacagagccagaggcacccctgatagattttccggctctggcagcggagccgacttcaccctgacaatcagcagagtggaacccgaggacttcgccacctactactgccagagatacggcggcacccctatcacatttggcggcggaaccacactggacaagaaaggcggaggtggaagtggtggtggcggtagcggaggcggtgggtccggaggtggtggatctgaacctaagagcagcgacaagacccacacctgtcctccatgtcctgctccagaactgctcggcggaccttccgtgttcctgtttcctccaaagcctaaggacaccctgatgatcagcagaacccctgaagtgacctgcgtggtggtggatgtgtctcacgaggacccagaagtgaagttcaattggtacgtggacggcgtggaagtgcacaacgccaagaccaagcctagagaggaacagtacaacagcacctacagagtggtgtccgtgctgacagtgctgcaccaggattggctgaacggcaaagagtacaagtgcaaggtgtccaacaaggccctgcctgctcctatcgagaaaaccatcagcaaggccaagggccagcctagggaaccccaggtttacacactgcctccaagccgcgaggaaatgaccaagaaccaggtgtccctgacctgcctcgtgaagggcttctacccttccgatatcgccgtggaatgggagagcaatggccagcctgagaacaactacaagacaacccctcctgtgctggacagcgacggctcattcttcctgtacagcaagctgaccgtggacaagtccagatggcagcagggcaacgtgttcagctgtagcgtgctgcacgaagccctgcacagccactacacccagaaaagcctgtctctgagccccggcaaatgataa

SEQ ID NO: 355 - RNA, 1611 nt, synthetic construct
  source 1..1611: mol_type = other RNA
atggattggatttggagaatcctgttcctcgtgggcgccgctaccggagcccactcccaaggcagactgtttcagtctggcgccgaagtgaaaagaccaggcgcctctgtgcggatcagctgcagagctgacgacgacccctacaccgacgacgataccttcaccaagtactggacccactggatcagacaggcccctggacaaagacctgagtggctgggagtgatcagccctcacttcgccagacctatctacagctacaagttccgggacagactgaccctgaccagagacagctctctgaccgccgtgtacctggaactgaagggcctgcagcctgacgacagcggcatctacttttgcgccagagatcccttcggcgacagagcccctcactacaactaccacatggacgtgtggggcggaggcacagccgtgatagtgtcttccggcggcggaggaagcggaggcgggggttctggcggtggtggctctggtggcggaggctcaggcggtggcggatctgaagttgtgctgacacagagccctgccatcctgagtgtgtccccaggcgatagagtgatcctgtcctgcagagcctctcagggcctcgattcttctcacctggcctggtacagattcaagcggggacagatccccacactggtcatcttcggcaccagcaacagagccagaggcacccctgatagattttccggctctggcagcggagccgacttcaccctgacaatcagcagagtggaacccgaggacttcgccacctactactgccagagatacggcggcacccctatcacatttggcggcggaaccacactggacaagaaaggcggaggtggaagtggtggtggcggtagcggaggcggtgggtccggaggtggtggatctgaacctaagagcagcgacaagacccacacctgtcctccatgtcctgctccagaactgctggccggaccttccgtgttcctgtttcctccaaagcctaaggacaccctgatgatcagcagaacccctgaagtgacctgcgtggtggtggatgtgtctcacgaggaccctgaagtgaagttcaattggtacgtggacggcgtggaagtgcacaacgccaagaccaagcctagagaggaacagtacaacagcacctacagagtggtgtccgtgctgaccgtgctgcaccaggattggctgaacggcaaagagtacaagtgcaaggtgtccaacaaggccctgcctctgcctgaggaaaagaccatcagcaaggccaagggccagcctagggaaccccaggtttacacactgcctccaagccgcgaggaaatgaccaagaaccaggtgtccctgacctgcctcgtgaagggcttctacccttccgatatcgccgtggaatgggagagcaatggccagcctgagaacaactacaagacaacccctcctgtgctggacagcgacggctcattcttcctgtacagcaagctgaccgtggacaagtccagatggcagcagggcaacgtgttcagctgtagcgtgctgcacgaagccctgcacagccactacacccagaaaagcctgtctctgagccccggcaaatgataa

SEQ ID NO: 356 - RNA, 1611 nt, synthetic construct
  source 1..1611: mol_type = other RNA
atggattggatttggagaatcctgttcctcgtgggcgccgctaccggagcccactcccaaggcagactgtttcagtctggcgccgaagtgaaaagaccaggcgcctctgtgcggatcagctgcagagctgacgacgacccctacaccgacgacgataccttcaccaagtactggacccactggatcagacaggcccctggacaaagacctgagtggctgggagtgatcagccctcacttcgccagacctatctacagctacaagttccgggacagactgaccctgaccagagacagctctctgaccgccgtgtacctggaactgaagggcctgcagcctgacgacagcggcatctacttttgcgccagagatcccttcggcgacagagcccctcactacaactaccacatggacgtgtggggcggaggcacagccgtgatagtgtcttccggcggcggaggaagcggaggcgggggttctggcggtggtggctctggtggcggaggctcaggcggtggcggatctgaagttgtgctgacacagagccctgccatcctgagtgtgtccccaggcgatagagtgatcctgtcctgcagagcctctcagggcctcgattcttctcacctggcctggtacagattcaagcggggacagatccccacactggtcatcttcggcaccagcaacagagccagaggcacccctgatagattttccggctctggcagcggagccgacttcaccctgacaatcagcagagtggaacccgaggacttcgccacctactactgccagagatacggcggcacccctatcacatttggcggcggaaccacactggacaagaaaggcggaggtggaagtggtggtggcggtagcggaggcggtgggtccggaggtggtggatctgaacctaagagcagcgacaagacccacacctgtcctccatgtcctgctccagaactgctggccggaccttccgtgttcctgtttcctccaaagcctaaggacaccctgatgatcagcagaacccctgaagtgacctgcgtggtggtggatgtgtctcacgaggaccctgaagtgaagttcaattggtacgtggacggcgtggaagtgcacaacgccaagaccaagcctagagaggaacagtacaacagcacctacagagtggtgtccgtgctgaccgtgctgcaccaggattggctgaacggcaaagagtacaagtgcaaggtgtccaacaaggccctgcctgcccctgaggaaaagaccatcagcaaggccaagggccagcctagggaaccccaggtttacacactgcctccaagccgcgaggaaatgaccaagaaccaggtgtccctgacctgcctcgtgaagggcttctacccttccgatatcgccgtggaatgggagagcaatggccagcctgagaacaactacaagacaacccctcctgtgctggacagcgacggctcattcttcctgtacagcaagctgaccgtggacaagtccagatggcagcagggcaacgtgttcagctgtagcgtgctgcacgaagccctgcacagccactacacccagaaaagcctgtctctgagccccggcaaatgataa

SEQ ID NO: 357 - RNA, 1611 nt, synthetic construct
  source 1..1611: mol_type = other RNA
atggattggatttggagaatcctgttcctcgtgggcgccgctaccggagcccactcccaaggcagactgtttcagtctggcgccgaagtgaaaagaccaggcgcctctgtgcggatcagctgcagagctgacgacgacccctacaccgacgacgataccttcaccaagtactggacccactggatcagacaggcccctggacaaagacctgagtggctgggagtgatcagccctcacttcgccagacctatctacagctacaagttccgggacagactgaccctgaccagagacagctctctgaccgccgtgtacctggaactgaagggcctgcagcctgacgacagcggcatctacttttgcgccagagatcccttcggcgacagagcccctcactacaactaccacatggacgtgtggggcggaggcacagccgtgatagtgtcttccggcggcggaggaagcggaggcgggggttctggcggtggtggctctggtggcggaggctcaggcggtggcggatctgaagttgtgctgacacagagccctgccatcctgagtgtgtccccaggcgatagagtgatcctgtcctgcagagcctctcagggcctcgattcttctcacctggcctggtacagattcaagcggggacagatccccacactggtcatcttcggcaccagcaacagagccagaggcacccctgatagattttccggctctggcagcggagccgacttcaccctgacaatcagcagagtggaacccgaggacttcgccacctactactgccagagatacggcggcacccctatcacatttggcggcggaaccacactggacaagaaaggcggaggtggaagtggtggtggcggtagcggaggcggtgggtccggaggtggtggatctgaacctaagagcagcgacaagacccacacctgtcctccatgtcctgctccagaactgctggccggaccttccgtgttcctgtttcctccaaagcctaaggacaccctgatgatcagcagaacccctgaagtgacctgcgtggtggtggatgtgtctcacgaggaccctgaagtgaagttcaattggtacgtggacggcgtggaagtgcacaacgccaagaccaagcctagagaggaacagtacaacagcacctacagagtggtgtccgtgctgaccgtgctgcaccaggattggctgaacggcaaagagtacaagtgcaaggtgtccaacaaggccctgcctgcccctatcgaaaagaccatcagcaaggccaagggccagcctagggaaccccaggtttacacactgcctccaagccgcgaggaaatgaccaagaaccaggtgtccctgacctgcctcgtgaagggcttctacccttccgatatcgccgtggaatgggagagcaatggccagcctgagaacaactacaagacaacccctcctgtgctggacagcgacggctcattcttcctgtacagcaagctgaccgtggacaagtccagatggcagcagggcaacgtgttcagctgtagcgtgctgcacgaagccctgcacagccactacacccagaaaagcctgtctctgagccccggcaaatgataa

SEQ ID NO: 358 - RNA, 1611 nt, synthetic construct
  source 1..1611: mol_type = other RNA
atggattggatttggagaatcctgttcctcgtgggcgccgctaccggagcccactcccaaggcagactgtttcagtctggcgccgaagtgaaaagaccaggcgcctctgtgcggatcagctgcagagctgacgacgacccctacaccgacgacgataccttcaccaagtactggacccactggatcagacaggcccctggacaaagacctgagtggctgggagtgatcagccctcacttcgccagacctatctacagctacaagttccgggacagactgaccctgaccagagacagctctctgaccgccgtgtacctggaactgaagggcctgcagcctgacgacagcggcatctacttttgcgccagagatcccttcggcgacagagcccctcactacaactaccacatggacgtgtggggcggaggcacagccgtgatagtgtcttccggcggcggaggaagcggaggcgggggttctggcggtggtggctctggtggcggaggctcaggcggtggcggatctgaagttgtgctgacacagagccctgccatcctgagtgtgtccccaggcgatagagtgatcctgtcctgcagagcctctcagggcctcgattcttctcacctggcctggtacagattcaagcggggacagatccccacactggtcatcttcggcaccagcaacagagccagaggcacccctgatagattttccggctctggcagcggagccgacttcaccctgacaatcagcagagtggaacccgaggacttcgccacctactactgccagagatacggcggcacccctatcacatttggcggcggaaccacactggacaagaaaggcggaggtggaagtggtggtggcggtagcggaggcggtgggtccggaggtggtggatctgaacctaagagcagcgacaagacccacacctgtcctccatgtcctgctccagaactgctgggcggaccttccgtgttcctgtttcctccaaagcctaaggacaccctgatgatcagcagaacccctgaagtgacctgcgtggtggtggatgtgtctcacgaggaccctgaagtgaagttcaattggtacgtggacggcgtggaagtgcacaacgccaagaccaagcctagagaggaacagtacaacagcacctacagagtggtgtccgtgctgaccgtgctgcaccaggattggctgaacggcaaagagtacaagtgcaaggtgtccaacaaggccctgcctgcccctgaggaaaagaccatcagcaaggccaagggccagcctagggaaccccaggtttacacactgcctccaagccgcgaggaaatgaccaagaaccaggtgtccctgacctgcctcgtgaagggcttctacccttccgatatcgccgtggaatgggagagcaatggccagcctgagaacaactacaagacaacccctcctgtgctggacagcgacggctcattcttcctgtacagcaagctgaccgtggacaagtccagatggcagcagggcaacgtgttcagctgtagcgtgctgcacgaagccctgcacagccactacacccagaaaagcctgtctctgagccccggcaaatgataa

SEQ ID NO: 359 - RNA, 1611 nt, synthetic construct
  source 1..1611: mol_type = other RNA
atggattggatttggagaatcctgttcctcgtgggcgccgctaccggagcccactcccaaggcagactgtttcagtctggcgccgaagtgaaaagaccaggcgcctctgtgcggatcagctgcagagctgacgacgacccctacaccgacgacgataccttcaccaagtactggacccactggatcagacaggcccctggacaaagacctgagtggctgggagtgatcagccctcacttcgccagacctatctacagctacaagttccgggacagactgaccctgaccagagacagctctctgaccgccgtgtacctggaactgaagggcctgcagcctgacgacagcggcatctacttttgcgccagagatcccttcggcgacagagcccctcactacaactaccacatggacgtgtggggcggaggcacagccgtgatagtgtcttccggcggcggaggaagcggaggcgggggttctggcggtggtggctctggtggcggaggctcaggcggtggcggatctgaagttgtgctgacacagagccctgccatcctgagtgtgtccccaggcgatagagtgatcctgtcctgcagagcctctcagggcctcgattcttctcacctggcctggtacagattcaagcggggacagatccccacactggtcatcttcggcaccagcaacagagccagaggcacccctgatagattttccggctctggcagcggagccgacttcaccctgacaatcagcagagtggaacccgaggacttcgccacctactactgccagagatacggcggcacccctatcacatttggcggcggaaccacactggacaagaaaggcggaggtggaagtggtggtggcggtagcggaggcggtgggtccggaggtggtggatctgaacctaagagcagcgacaagacccacacctgtcctccatgtcctgctccagaactgctcggcggaccttccgtgttcctgtttcctccaaagcctaaggacaccctgatgatcagcagaacccctgaagtgacctgcgtggtggtggatgtgtctcacgaggacccagaagtgaagttcaattggtacgtggacggcgtggaagtgcacaacgccaagaccaagcctagagaggaacagtacaacagcacctacagagtggtgtccgtgctgacagtgctgcaccaggattggctgaacggcaaagagtacaagtgcaaggtgtccaacaaggccctgcctgctcctatcgagaaaaccatcagcaaggccaagggccagcctcgcgaacctcaagtctgtacactgcctcctagccgcgaggaaatgaccaagaaccaggtgtccctgagctgcgccgtgaagggcttttacccttccgatatcgccgtggaatgggagagcaatggccagcctgagaacaactacaagacaacccctcctgtgctggacagcgacggctcattcttcctggtgtccaagctgacagtggacaagagcagatggcagcagggcaacgtgttcagctgcagcgtgctgcatgaagccctgcacagccactacacccagaagtccctgtctctgagccccggcaagtgataa

SEQ ID NO: 360 - RNA, 1611 nt, synthetic construct
  source 1..1611: mol_type = other RNA
atggattggatttggagaatcctgttcctcgtgggcgccgctaccggagcccactcccaaggcagactgtttcagtctggcgccgaagtgaaaagaccaggcgcctctgtgcggatcagctgcagagctgacgacgacccctacaccgacgacgataccttcaccaagtactggacccactggatcagacaggcccctggacaaagacctgagtggctgggagtgatcagccctcacttcgccagacctatctacagctacaagttccgggacagactgaccctgaccagagacagctctctgaccgccgtgtacctggaactgaagggcctgcagcctgacgacagcggcatctacttttgcgccagagatcccttcggcgacagagcccctcactacaactaccacatggacgtgtggggcggaggcacagccgtgatagtgtcttccggcggcggaggaagcggaggcgggggttctggcggtggtggctctggtggcggaggctcaggcggtggcggatctgaagttgtgctgacacagagccctgccatcctgagtgtgtccccaggcgatagagtgatcctgtcctgcagagcctctcagggcctcgattcttctcacctggcctggtacagattcaagcggggacagatccccacactggtcatcttcggcaccagcaacagagccagaggcacccctgatagattttccggctctggcagcggagccgacttcaccctgacaatcagcagagtggaacccgaggacttcgccacctactactgccagagatacggcggcacccctatcacatttggcggcggaaccacactggacaagaaaggcggaggtggaagtggtggtggcggtagcggaggcggtgggtccggaggtggtggatctgaacctaagagcagcgacaagacccacacctgtcctccatgtcctgctccagaactgctggccggaccttccgtgttcctgtttcctccaaagcctaaggacaccctgatgatcagcagaacccctgaagtgacctgcgtggtggtggatgtgtctcacgaggaccctgaagtgaagttcaattggtacgtggacggcgtggaagtgcacaacgccaagaccaagcctagagaggaacagtacaacagcacctacagagtggtgtccgtgctgaccgtgctgcaccaggattggctgaacggcaaagagtacaagtgcaaggtgtccaacaaggccctgcctctgcctgaggaaaagaccatcagcaaggccaagggccagcctcgcgaacctcaagtctgtacactgcctcctagccgcgaggaaatgaccaagaaccaggtgtccctgagctgcgccgtgaagggcttttacccttccgatatcgccgtggaatgggagagcaatggccagcctgagaacaactacaagacaacccctcctgtgctggacagcgacggctcattcttcctggtgtccaagctgacagtggacaagagcagatggcagcagggcaacgtgttcagctgcagcgtgctgcatgaagccctgcacagccactacacccagaagtccctgtctctgagccccggcaagtgataa

SEQ ID NO: 361 - RNA, 1611 nt, synthetic construct
  source 1..1611: mol_type = other RNA
atggattggatttggagaatcctgttcctcgtgggcgccgctaccggagcccactcccaaggcagactgtttcagtctggcgccgaagtgaaaagaccaggcgcctctgtgcggatcagctgcagagctgacgacgacccctacaccgacgacgataccttcaccaagtactggacccactggatcagacaggcccctggacaaagacctgagtggctgggagtgatcagccctcacttcgccagacctatctacagctacaagttccgggacagactgaccctgaccagagacagctctctgaccgccgtgtacctggaactgaagggcctgcagcctgacgacagcggcatctacttttgcgccagagatcccttcggcgacagagcccctcactacaactaccacatggacgtgtggggcggaggcacagccgtgatagtgtcttccggcggcggaggaagcggaggcgggggttctggcggtggtggctctggtggcggaggctcaggcggtggcggatctgaagttgtgctgacacagagccctgccatcctgagtgtgtccccaggcgatagagtgatcctgtcctgcagagcctctcagggcctcgattcttctcacctggcctggtacagattcaagcggggacagatccccacactggtcatcttcggcaccagcaacagagccagaggcacccctgatagattttccggctctggcagcggagccgacttcaccctgacaatcagcagagtggaacccgaggacttcgccacctactactgccagagatacggcggcacccctatcacatttggcggcggaaccacactggacaagaaaggcggaggtggaagtggtggtggcggtagcggaggcggtgggtccggaggtggtggatctgaacctaagagcagcgacaagacccacacctgtcctccatgtcctgctccagaactgctggccggaccttccgtgttcctgtttcctccaaagcctaaggacaccctgatgatcagcagaacccctgaagtgacctgcgtggtggtggatgtgtctcacgaggaccctgaagtgaagttcaattggtacgtggacggcgtggaagtgcacaacgccaagaccaagcctagagaggaacagtacaacagcacctacagagtggtgtccgtgctgaccgtgctgcaccaggattggctgaacggcaaagagtacaagtgcaaggtgtccaacaaggccctgcctgcccctgaggaaaagaccatcagcaaggccaagggccagcctcgcgaacctcaagtctgtacactgcctcctagccgcgaggaaatgaccaagaaccaggtgtccctgagctgcgccgtgaagggcttttacccttccgatatcgccgtggaatgggagagcaatggccagcctgagaacaactacaagacaacccctcctgtgctggacagcgacggctcattcttcctggtgtccaagctgacagtggacaagagcagatggcagcagggcaacgtgttcagctgcagcgtgctgcatgaagccctgcacagccactacacccagaagtccctgtctctgagccccggcaagtgataa

SEQ ID NO: 362 - RNA, 1611 nt, synthetic construct
  source 1..1611: mol_type = other RNA
atggattggatttggagaatcctgttcctcgtgggcgccgctaccggagcccactcccaaggcagactgtttcagtctggcgccgaagtgaaaagaccaggcgcctctgtgcggatcagctgcagagctgacgacgacccctacaccgacgacgataccttcaccaagtactggacccactggatcagacaggcccctggacaaagacctgagtggctgggagtgatcagccctcacttcgccagacctatctacagctacaagttccgggacagactgaccctgaccagagacagctctctgaccgccgtgtacctggaactgaagggcctgcagcctgacgacagcggcatctacttttgcgccagagatcccttcggcgacagagcccctcactacaactaccacatggacgtgtggggcggaggcacagccgtgatagtgtcttccggcggcggaggaagcggaggcgggggttctggcggtggtggctctggtggcggaggctcaggcggtggcggatctgaagttgtgctgacacagagccctgccatcctgagtgtgtccccaggcgatagagtgatcctgtcctgcagagcctctcagggcctcgattcttctcacctggcctggtacagattcaagcggggacagatccccacactggtcatcttcggcaccagcaacagagccagaggcacccctgatagattttccggctctggcagcggagccgacttcaccctgacaatcagcagagtggaacccgaggacttcgccacctactactgccagagatacggcggcacccctatcacatttggcggcggaaccacactggacaagaaaggcggaggtggaagtggtggtggcggtagcggaggcggtgggtccggaggtggtggatctgaacctaagagcagcgacaagacccacacctgtcctccatgtcctgctccagaactgctggccggaccttccgtgttcctgtttcctccaaagcctaaggacaccctgatgatcagcagaacccctgaagtgacctgcgtggtggtggatgtgtctcacgaggaccctgaagtgaagttcaattggtacgtggacggcgtggaagtgcacaacgccaagaccaagcctagagaggaacagtacaacagcacctacagagtggtgtccgtgctgaccgtgctgcaccaggattggctgaacggcaaagagtacaagtgcaaggtgtccaacaaggccctgcctgcccctatcgaaaagaccatcagcaaggccaagggccagcctcgcgaacctcaagtctgtacactgcctcctagccgcgaggaaatgaccaagaaccaggtgtccctgagctgcgccgtgaagggcttttacccttccgatatcgccgtggaatgggagagcaatggccagcctgagaacaactacaagacaacccctcctgtgctggacagcgacggctcattcttcctggtgtccaagctgacagtggacaagagcagatggcagcagggcaacgtgttcagctgcagcgtgctgcatgaagccctgcacagccactacacccagaagtccctgtctctgagccccggcaagtgataa

SEQ ID NO: 363 - RNA, 1611 nt, synthetic construct
  source 1..1611: mol_type = other RNA
atggattggatttggagaatcctgttcctcgtgggcgccgctaccggagcccactcccaaggcagactgtttcagtctggcgccgaagtgaaaagaccaggcgcctctgtgcggatcagctgcagagctgacgacgacccctacaccgacgacgataccttcaccaagtactggacccactggatcagacaggcccctggacaaagacctgagtggctgggagtgatcagccctcacttcgccagacctatctacagctacaagttccgggacagactgaccctgaccagagacagctctctgaccgccgtgtacctggaactgaagggcctgcagcctgacgacagcggcatctacttttgcgccagagatcccttcggcgacagagcccctcactacaactaccacatggacgtgtggggcggaggcacagccgtgatagtgtcttccggcggcggaggaagcggaggcgggggttctggcggtggtggctctggtggcggaggctcaggcggtggcggatctgaagttgtgctgacacagagccctgccatcctgagtgtgtccccaggcgatagagtgatcctgtcctgcagagcctctcagggcctcgattcttctcacctggcctggtacagattcaagcggggacagatccccacactggtcatcttcggcaccagcaacagagccagaggcacccctgatagattttccggctctggcagcggagccgacttcaccctgacaatcagcagagtggaacccgaggacttcgccacctactactgccagagatacggcggcacccctatcacatttggcggcggaaccacactggacaagaaaggcggaggtggaagtggtggtggcggtagcggaggcggtgggtccggaggtggtggatctgaacctaagagcagcgacaagacccacacctgtcctccatgtcctgctccagaactgctgggcggaccttccgtgttcctgtttcctccaaagcctaaggacaccctgatgatcagcagaacccctgaagtgacctgcgtggtggtggatgtgtctcacgaggaccctgaagtgaagttcaattggtacgtggacggcgtggaagtgcacaacgccaagaccaagcctagagaggaacagtacaacagcacctacagagtggtgtccgtgctgaccgtgctgcaccaggattggctgaacggcaaagagtacaagtgcaaggtgtccaacaaggccctgcctgcccctgaggaaaagaccatcagcaaggccaagggccagcctcgcgaacctcaagtctgtacactgcctcctagccgcgaggaaatgaccaagaaccaggtgtccctgagctgcgccgtgaagggcttttacccttccgatatcgccgtggaatgggagagcaatggccagcctgagaacaactacaagacaacccctcctgtgctggacagcgacggctcattcttcctggtgtccaagctgacagtggacaagagcagatggcagcagggcaacgtgttcagctgcagcgtgctgcatgaagccctgcacagccactacacccagaagtccctgtctctgagccccggcaagtgataa

SEQ ID NO: 364 - RNA, 1611 nt, synthetic construct
  source 1..1611: mol_type = other RNA
atggattggatttggagaatcctgttcctcgtgggcgccgctaccggagcccactcccaaggcagactgtttcagtctggcgccgaagtgaaaagaccaggcgcctctgtgcggatcagctgcagagctgacgacgacccctacaccgacgacgataccttcaccaagtactggacccactggatcagacaggcccctggacaaagacctgagtggctgggagtgatcagccctcacttcgccagacctatctacagctacaagttccgggacagactgaccctgaccagagacagctctctgaccgccgtgtacctggaactgaagggcctgcagcctgacgacagcggcatctacttttgcgccagagatcccttcggcgacagagcccctcactacaactaccacatggacgtgtggggcggaggcacagccgtgatagtgtcttccggcggcggaggaagcggaggcgggggttctggcggtggtggctctggtggcggaggctcaggcggtggcggatctgaagttgtgctgacacagagccctgccatcctgagtgtgtccccaggcgatagagtgatcctgtcctgcagagcctctcagggcctcgattcttctcacctggcctggtacagattcaagcggggacagatccccacactggtcatcttcggcaccagcaacagagccagaggcacccctgatagattttccggctctggcagcggagccgacttcaccctgacaatcagcagagtggaacccgaggacttcgccacctactactgccagagatacggcggcacccctatcacatttggcggcggaaccacactggacaagaaaggcggaggtggaagtggtggtggcggtagcggaggcggtgggtccggaggtggtggatctgaacctaagagcagcgacaagacccacacctgtcctccatgtcctgctccagaactgctcggcggaccttccgtgttcctgtttcctccaaagcctaaggacaccctgatgatcagcagaacccctgaagtgacctgcgtggtggtggatgtgtctcacgaggacccagaagtgaagttcaattggtacgtggacggcgtggaagtgcacaacgccaagaccaagcctagagaggaacagtacaacagcacctacagagtggtgtccgtgctgacagtgctgcaccaggattggctgaacggcaaagagtacaagtgcaaggtgtccaacaaggccctgcctgctcctatcgagaaaaccatcagcaaggccaagggccagcctagggaaccccaggtttacaccctgcctccatgccgcgaggaaatgaccaagaaccaggtgtccctgtggtgcctggtcaagggcttctacccttccgatatcgccgtggaatgggagagcaatggccagcctgagaacaactacaagacaacccctcctgtgctggacagcgacggctcattcttcctgtacagcaagctgacagtggacaagagcagatggcagcagggcaacgtgttcagctgcagcgtgctgcatgaagccctgcacagccactacacccagaagtccctgtctctgagccccggcaagtgataa

SEQ ID NO: 365 - RNA, 1611 nt, synthetic construct
  source 1..1611: mol_type = other RNA
atggattggatttggagaatcctgttcctcgtgggcgccgctaccggagcccactcccaaggcagactgtttcagtctggcgccgaagtgaaaagaccaggcgcctctgtgcggatcagctgcagagctgacgacgacccctacaccgacgacgataccttcaccaagtactggacccactggatcagacaggcccctggacaaagacctgagtggctgggagtgatcagccctcacttcgccagacctatctacagctacaagttccgggacagactgaccctgaccagagacagctctctgaccgccgtgtacctggaactgaagggcctgcagcctgacgacagcggcatctacttttgcgccagagatcccttcggcgacagagcccctcactacaactaccacatggacgtgtggggcggaggcacagccgtgatagtgtcttccggcggcggaggaagcggaggcgggggttctggcggtggtggctctggtggcggaggctcaggcggtggcggatctgaagttgtgctgacacagagccctgccatcctgagtgtgtccccaggcgatagagtgatcctgtcctgcagagcctctcagggcctcgattcttctcacctggcctggtacagattcaagcggggacagatccccacactggtcatcttcggcaccagcaacagagccagaggcacccctgatagattttccggctctggcagcggagccgacttcaccctgacaatcagcagagtggaacccgaggacttcgccacctactactgccagagatacggcggcacccctatcacatttggcggcggaaccacactggacaagaaaggcggaggtggaagtggtggtggcggtagcggaggcggtgggtccggaggtggtggatctgaacctaagagcagcgacaagacccacacctgtcctccatgtcctgctccagaactgctggccggaccttccgtgttcctgtttcctccaaagcctaaggacaccctgatgatcagcagaacccctgaagtgacctgcgtggtggtggatgtgtctcacgaggaccctgaagtgaagttcaattggtacgtggacggcgtggaagtgcacaacgccaagaccaagcctagagaggaacagtacaacagcacctacagagtggtgtccgtgctgaccgtgctgcaccaggattggctgaacggcaaagagtacaagtgcaaggtgtccaacaaggccctgcctctgcctgaggaaaagaccatcagcaaggccaagggccagcctagggaaccccaggtttacaccctgcctccatgccgcgaggaaatgaccaagaaccaggtgtccctgtggtgcctggtcaagggcttctacccttccgatatcgccgtggaatgggagagcaatggccagcctgagaacaactacaagacaacccctcctgtgctggacagcgacggctcattcttcctgtacagcaagctgacagtggacaagagcagatggcagcagggcaacgtgttcagctgcagcgtgctgcatgaagccctgcacagccactacacccagaagtccctgtctctgagccccggcaagtgataa

SEQ ID NO: 366 - RNA, 1611 nt, synthetic construct
  source 1..1611: mol_type = other RNA
atggattggatttggagaatcctgttcctcgtgggcgccgctaccggagcccactcccaaggcagactgtttcagtctggcgccgaagtgaaaagaccaggcgcctctgtgcggatcagctgcagagctgacgacgacccctacaccgacgacgataccttcaccaagtactggacccactggatcagacaggcccctggacaaagacctgagtggctgggagtgatcagccctcacttcgccagacctatctacagctacaagttccgggacagactgaccctgaccagagacagctctctgaccgccgtgtacctggaactgaagggcctgcagcctgacgacagcggcatctacttttgcgccagagatcccttcggcgacagagcccctcactacaactaccacatggacgtgtggggcggaggcacagccgtgatagtgtcttccggcggcggaggaagcggaggcgggggttctggcggtggtggctctggtggcggaggctcaggcggtggcggatctgaagttgtgctgacacagagccctgccatcctgagtgtgtccccaggcgatagagtgatcctgtcctgcagagcctctcagggcctcgattcttctcacctggcctggtacagattcaagcggggacagatccccacactggtcatcttcggcaccagcaacagagccagaggcacccctgatagattttccggctctggcagcggagccgacttcaccctgacaatcagcagagtggaacccgaggacttcgccacctactactgccagagatacggcggcacccctatcacatttggcggcggaaccacactggacaagaaaggcggaggtggaagtggtggtggcggtagcggaggcggtgggtccggaggtggtggatctgaacctaagagcagcgacaagacccacacctgtcctccatgtcctgctccagaactgctggccggaccttccgtgttcctgtttcctccaaagcctaaggacaccctgatgatcagcagaacccctgaagtgacctgcgtggtggtggatgtgtctcacgaggaccctgaagtgaagttcaattggtacgtggacggcgtggaagtgcacaacgccaagaccaagcctagagaggaacagtacaacagcacctacagagtggtgtccgtgctgaccgtgctgcaccaggattggctgaacggcaaagagtacaagtgcaaggtgtccaacaaggccctgcctgcccctgaggaaaagaccatcagcaaggccaagggccagcctagggaaccccaggtttacaccctgcctccatgccgcgaggaaatgaccaagaaccaggtgtccctgtggtgcctggtcaagggcttctacccttccgatatcgccgtggaatgggagagcaatggccagcctgagaacaactacaagacaacccctcctgtgctggacagcgacggctcattcttcctgtacagcaagctgacagtggacaagagcagatggcagcagggcaacgtgttcagctgcagcgtgctgcatgaagccctgcacagccactacacccagaagtccctgtctctgagccccggcaagtgataa

SEQ ID NO: 367 - RNA, 1611 nt, synthetic construct
  source 1..1611: mol_type = other RNA
atggattggatttggagaatcctgttcctcgtgggcgccgctaccggagcccactcccaaggcagactgtttcagtctggcgccgaagtgaaaagaccaggcgcctctgtgcggatcagctgcagagctgacgacgacccctacaccgacgacgataccttcaccaagtactggacccactggatcagacaggcccctggacaaagacctgagtggctgggagtgatcagccctcacttcgccagacctatctacagctacaagttccgggacagactgaccctgaccagagacagctctctgaccgccgtgtacctggaactgaagggcctgcagcctgacgacagcggcatctacttttgcgccagagatcccttcggcgacagagcccctcactacaactaccacatggacgtgtggggcggaggcacagccgtgatagtgtcttccggcggcggaggaagcggaggcgggggttctggcggtggtggctctggtggcggaggctcaggcggtggcggatctgaagttgtgctgacacagagccctgccatcctgagtgtgtccccaggcgatagagtgatcctgtcctgcagagcctctcagggcctcgattcttctcacctggcctggtacagattcaagcggggacagatccccacactggtcatcttcggcaccagcaacagagccagaggcacccctgatagattttccggctctggcagcggagccgacttcaccctgacaatcagcagagtggaacccgaggacttcgccacctactactgccagagatacggcggcacccctatcacatttggcggcggaaccacactggacaagaaaggcggaggtggaagtggtggtggcggtagcggaggcggtgggtccggaggtggtggatctgaacctaagagcagcgacaagacccacacctgtcctccatgtcctgctccagaactgctggccggaccttccgtgttcctgtttcctccaaagcctaaggacaccctgatgatcagcagaacccctgaagtgacctgcgtggtggtggatgtgtctcacgaggaccctgaagtgaagttcaattggtacgtggacggcgtggaagtgcacaacgccaagaccaagcctagagaggaacagtacaacagcacctacagagtggtgtccgtgctgaccgtgctgcaccaggattggctgaacggcaaagagtacaagtgcaaggtgtccaacaaggccctgcctgcccctatcgaaaagaccatcagcaaggccaagggccagcctagggaaccccaggtttacaccctgcctccatgccgcgaggaaatgaccaagaaccaggtgtccctgtggtgcctggtcaagggcttctacccttccgatatcgccgtggaatgggagagcaatggccagcctgagaacaactacaagacaacccctcctgtgctggacagcgacggctcattcttcctgtacagcaagctgacagtggacaagagcagatggcagcagggcaacgtgttcagctgcagcgtgctgcatgaagccctgcacagccactacacccagaagtccctgtctctgagccccggcaagtgataa

SEQ ID NO: 368 - RNA, 1611 nt, synthetic construct
  source 1..1611: mol_type = other RNA
atggattggatttggagaatcctgttcctcgtgggcgccgctaccggagcccactcccaaggcagactgtttcagtctggcgccgaagtgaaaagaccaggcgcctctgtgcggatcagctgcagagctgacgacgacccctacaccgacgacgataccttcaccaagtactggacccactggatcagacaggcccctggacaaagacctgagtggctgggagtgatcagccctcacttcgccagacctatctacagctacaagttccgggacagactgaccctgaccagagacagctctctgaccgccgtgtacctggaactgaagggcctgcagcctgacgacagcggcatctacttttgcgccagagatcccttcggcgacagagcccctcactacaactaccacatggacgtgtggggcggaggcacagccgtgatagtgtcttccggcggcggaggaagcggaggcgggggttctggcggtggtggctctggtggcggaggctcaggcggtggcggatctgaagttgtgctgacacagagccctgccatcctgagtgtgtccccaggcgatagagtgatcctgtcctgcagagcctctcagggcctcgattcttctcacctggcctggtacagattcaagcggggacagatccccacactggtcatcttcggcaccagcaacagagccagaggcacccctgatagattttccggctctggcagcggagccgacttcaccctgacaatcagcagagtggaacccgaggacttcgccacctactactgccagagatacggcggcacccctatcacatttggcggcggaaccacactggacaagaaaggcggaggtggaagtggtggtggcggtagcggaggcggtgggtccggaggtggtggatctgaacctaagagcagcgacaagacccacacctgtcctccatgtcctgctccagaactgctgggcggaccttccgtgttcctgtttcctccaaagcctaaggacaccctgatgatcagcagaacccctgaagtgacctgcgtggtggtggatgtgtctcacgaggaccctgaagtgaagttcaattggtacgtggacggcgtggaagtgcacaacgccaagaccaagcctagagaggaacagtacaacagcacctacagagtggtgtccgtgctgaccgtgctgcaccaggattggctgaacggcaaagagtacaagtgcaaggtgtccaacaaggccctgcctgcccctgaggaaaagaccatcagcaaggccaagggccagcctagggaaccccaggtttacaccctgcctccatgccgcgaggaaatgaccaagaaccaggtgtccctgtggtgcctggtcaagggcttctacccttccgatatcgccgtggaatgggagagcaatggccagcctgagaacaactacaagacaacccctcctgtgctggacagcgacggctcattcttcctgtacagcaagctgacagtggacaagagcagatggcagcagggcaacgtgttcagctgcagcgtgctgcatgaagccctgcacagccactacacccagaagtccctgtctctgagccccggcaagtgataa

SEQ ID NO: 369 - RNA, 1611 nt, synthetic construct; identical to SEQ ID NO: 353
  source 1..1611: mol_type = other RNA

SEQ ID NO: 370 - RNA, 1611 nt, synthetic construct; identical to SEQ ID NO: 354
  source 1..1611: mol_type = other RNA

SEQ ID NO: 371 - RNA, 1611 nt, synthetic construct; identical to SEQ ID NO: 355
  source 1..1611: mol_type = other RNA

SEQ ID NO: 372 - RNA, 1611 nt, synthetic construct; identical to SEQ ID NO: 356
  source 1..1611: mol_type = other RNA

SEQ ID NO: 373 - RNA, 1611 nt, synthetic construct; identical to SEQ ID NO: 357
  source 1..1611: mol_type = other RNA

SEQ ID NO: 374 - RNA, 1611 nt, synthetic construct; identical to SEQ ID NO: 358
  source 1..1611: mol_type = other RNA

SEQ ID NO: 375 - RNA, 1611 nt, synthetic construct; identical to SEQ ID NO: 359
  source 1..1611: mol_type = other RNA

SEQ ID NO: 376 - RNA, 1611 nt, synthetic construct; identical to SEQ ID NO: 360
  source 1..1611: mol_type = other RNA

SEQ ID NO: 377 - RNA, 1611 nt, synthetic construct; identical to SEQ ID NO: 361
  source 1..1611: mol_type = other RNA

SEQ ID NO: 378 - RNA, 1611 nt, synthetic construct; identical to SEQ ID NO: 362
  source 1..1611: mol_type = other RNA

SEQ ID NO: 379 - RNA, 1611 nt, synthetic construct; identical to SEQ ID NO: 363
  source 1..1611: mol_type = other RNA

SEQ ID NO: 380 - RNA, 1611 nt, synthetic construct; identical to SEQ ID NO: 364
  source 1..1611: mol_type = other RNA

SEQ ID NO: 381 - RNA, 1611 nt, synthetic construct; identical to SEQ ID NO: 365
  source 1..1611: mol_type = other RNA

SEQ ID NO: 382 - RNA, 1611 nt, synthetic construct; identical to SEQ ID NO: 366
  source 1..1611: mol_type = other RNA

SEQ ID NO: 383 - RNA, 1611 nt, synthetic construct; identical to SEQ ID NO: 367
  source 1..1611: mol_type = other RNA

SEQ ID NO: 384 - RNA, 1611 nt, synthetic construct; identical to SEQ ID NO: 368
  source 1..1611: mol_type = other RNA

SEQ ID NO: 385 - RNA, 1611 nt, synthetic construct
  source 1..1611: mol_type = other RNA
atggattggatttggagaatcctgttcctcgtgggcgccgctaccggagcccactcccaaggcagactgtttcagtctggcgccgaagtgaaaagaccaggcgcctctgtgcggatcagctgcagagctgacgacgacccctacaccgacgacgataccttcaccaagtactggacccactggatcagacaggcccctggacaaagacctgagtggctgggagtgatcagccctcacttcgccagacctatctacagctacaagttccgggacagactgaccctgaccagagacagctctctgaccgccgtgtacctggaactgaagggcctgcagcctgacgacagcggcatctacttttgcgccagagatcccttcggcgacagagcccctcactacaactaccacatggacgtgtggggcggaggcacagccgtgatagtgtcttccggcggcggaggaagcggaggcgggggttctggcggtggtggctctggtggcggaggctcaggcggtggcggatctgaagttgtgctgacacagagccctgccatcctgagtgtgtccccaggcgatagagtgatcctgtcctgcagagcctctcagggcctcgattcttctcacctggcctggtacagattcaagcggggacagatccccacactggtcatcttcggcaccagcaacagagccagaggcacccctgatagattttccggctctggcagcggagccgacttcaccctgacaatcagcagagtggaacccgaggacttcgccacctactactgccagagatacggcggcacccctatcacatttggcggcggaaccacactggacaagaaaggcggaggtggaagtggtggtggcggtagcggaggcggtgggtccggaggtggtggatctgaacctaagagcagcgacaagacccacacctgtcctccatgtcctgctccagaactgctcggcggaccttccgtgttcctgtttcctccaaagcctaaggacaccctgatgatcagcagaacccctgaagtgacctgcgtggtggtggatgtgtctcacgaggacccagaagtgaagttcaattggtacgtggacggcgtggaagtgcacaacgccaagaccaagcctagagaggaacagtacaacagcacctacagagtggtgtccgtgctgacagtgctgcaccaggattggctgaacggcaaagagtacaagtgcaaggtgtccaacaaggccctgcctgctcctatcgagaaaaccatcagcaaggccaagggccagcctagggaaccccaggtttacacactgcctccaagccgcgacgaactgaccaagaaccaggtgtccctgacctgcctcgtgaagggcttctacccttccgatatcgccgtggaatgggagagcaatggccagcctgagaacaactacaagacaacccctcctgtgctggacagcgacggctcattcttcctgtacagcaagctgactgtggataagtcccggtggcagcagggcaacgtgttcagctgttctgtgatgcacgaagccctgcacaaccactacacccagaaaagcctgtctctgagccccggcaagtgataa

SEQ ID NO: 386 - RNA, 1611 nt, synthetic construct
  source 1..1611: mol_type = other RNA
atggattggatttggagaatcctgttcctcgtgggcgccgctaccggagcccactcccaaggcagactgtttcagtctggcgccgaagtgaaaagaccaggcgcctctgtgcggatcagctgcagagctgacgacgacccctacaccgacgacgataccttcaccaagtactggacccactggatcagacaggcccctggacaaagacctgagtggctgggagtgatcagccctcacttcgccagacctatctacagctacaagttccgggacagactgaccctgaccagagacagctctctgaccgccgtgtacctggaactgaagggcctgcagcctgacgacagcggcatctacttttgcgccagagatcccttcggcgacagagcccctcactacaactaccacatggacgtgtggggcggaggcacagccgtgatagtgtcttccggcggcggaggaagcggaggcgggggttctggcggtggtggctctggtggcggaggctcaggcggtggcggatctgaagttgtgctgacacagagccctgccatcctgagtgtgtccccaggcgatagagtgatcctgtcctgcagagcctctcagggcctcgattcttctcacctggcctggtacagattcaagcggggacagatccccacactggtcatcttcggcaccagcaacagagccagaggcacccctgatagattttccggctctggcagcggagccgacttcaccctgacaatcagcagagtggaacccgaggacttcgccacctactactgccagagatacggcggcacccctatcacatttggcggcggaaccacactggacaagaaaggcggaggtggaagtggtggtggcggtagcggaggcggtgggtccggaggtggtggatctgaacctaagagcagcgacaagacccacacctgtcctccatgtcctgctccagaactgctcggcggaccttccgtgttcctgtttcctccaaagcctaaggacaccctgatgatcagcagaacccctgaagtgacctgcgtggtggtggatgtgtctcacgaggacccagaagtgaagttcaattggtacgtggacggcgtggaagtgcacaacgccaagaccaagcctagagaggaacagtacaacagcacctacagagtggtgtccgtgctgacagtgctgcaccaggattggctgaacggcaaagagtacaagtgcaaggtgtccaacaaggccctgcctgctcctatcgagaaaaccatcagcaaggccaagggccagcctagggaaccccaggtttacacactgcctccaagccgcgacgaactgaccaagaaccaggtgtccctgacctgcctcgtgaagggcttctacccttccgatatcgccgtggaatgggagagcaatggccagcctgagaacaactacaagacaacccctcctgtgctggacagcgacggctcattcttcctgtacagcaagctgaccgtggacaagtccagatggcagcagggcaacgtgttcagctgtagcgtgctgcacgaagccctgcacagccactacacccagaaaagcctgtctctgagccccggcaaatgataa

SEQ ID NO: 387 - RNA, 1611 nt, synthetic construct
  source 1..1611: mol_type = other RNA
atggattggatttggagaatcctgttcctcgtgggcgccgctaccggagcccactcccaaggcagactgtttcagtctggcgccgaagtgaaaagaccaggcgcctctgtgcggatcagctgcagagctgacgacgacccctacaccgacgacgataccttcaccaagtactggacccactggatcagacaggcccctggacaaagacctgagtggctgggagtgatcagccctcacttcgccagacctatctacagctacaagttccgggacagactgaccctgaccagagacagctctctgaccgccgtgtacctggaactgaagggcctgcagcctgacgacagcggcatctacttttgcgccagagatcccttcggcgacagagcccctcactacaactaccacatggacgtgtggggcggaggcacagccgtgatagtgtcttccggcggcggaggaagcggaggcgggggttctggcggtggtggctctggtggcggaggctcaggcggtggcggatctgaagttgtgctgacacagagccctgccatcctgagtgtgtccccaggcgatagagtgatcctgtcctgcagagcctctcagggcctcgattcttctcacctggcctggtacagattcaagcggggacagatccccacactggtcatcttcggcaccagcaacagagccagaggcacccctgatagattttccggctctggcagcggagccgacttcaccctgacaatcagcagagtggaacccgaggacttcgccacctactactgccagagatacggcggcacccctatcacatttggcggcggaaccacactggacaagaaaggcggaggtggaagtggtggtggcggtagcggaggcggtgggtccggaggtggtggatctgaacctaagagcagcgacaagacccacacctgtcctccatgtcctgctccagaactgctggccggaccttccgtgttcctgtttcctccaaagcctaaggacaccctgatgatcagcagaacccctgaagtgacctgcgtggtggtggatgtgtctcacgaggaccctgaagtgaagttcaattggtacgtggacggcgtggaagtgcacaacgccaagaccaagcctagagaggaacagtacaacagcacctacagagtggtgtccgtgctgaccgtgctgcaccaggattggctgaacggcaaagagtacaagtgcaaggtgtccaacaaggccctgcctctgcctgaggaaaagaccatcagcaaggccaagggccagcctagggaaccccaggtttacacactgcctccaagccgcgacgaactgaccaagaaccaggtgtccctgacctgcctcgtgaagggcttctacccttccgatatcgccgtggaatgggagagcaatggccagcctgagaacaactacaagacaacccctcctgtgctggacagcgacggctcattcttcctgtacagcaagctgaccgtggacaagtccagatggcagcagggcaacgtgttcagctgtagcgtgctgcacgaagccctgcacagccactacacccagaaaagcctgtctctgagccccggcaaatgataa

SEQ ID NO: 388 - RNA, 1611 nt, synthetic construct
  source 1..1611: mol_type = other RNA
atggattggatttggagaatcctgttcctcgtgggcgccgctaccggagcccactcccaaggcagactgtttcagtctggcgccgaagtgaaaagaccaggcgcctctgtgcggatcagctgcagagctgacgacgacccctacaccgacgacgataccttcaccaagtactggacccactggatcagacaggcccctggacaaagacctgagtggctgggagtgatcagccctcacttcgccagacctatctacagctacaagttccgggacagactgaccctgaccagagacagctctctgaccgccgtgtacctggaactgaagggcctgcagcctgacgacagcggcatctacttttgcgccagagatcccttcggcgacagagcccctcactacaactaccacatggacgtgtggggcggaggcacagccgtgatagtgtcttccggcggcggaggaagcggaggcgggggttctggcggtggtggctctggtggcggaggctcaggcggtggcggatctgaagttgtgctgacacagagccctgccatcctgagtgtgtccccaggcgatagagtgatcctgtcctgcagagcctctcagggcctcgattcttctcacctggcctggtacagattcaagcggggacagatccccacactggtcatcttcggcaccagcaacagagccagaggcacccctgatagattttccggctctggcagcggagccgacttcaccctgacaatcagcagagtggaacccgaggacttcgccacctactactgccagagatacggcggcacccctatcacatttggcggcggaaccacactggacaagaaaggcggaggtggaagtggtggtggcggtagcggaggcggtgggtccggaggtggtggatctgaacctaagagcagcgacaagacccacacctgtcctccatgtcctgctccagaactgctggccggaccttccgtgttcctgtttcctccaaagcctaaggacaccctgatgatcagcagaacccctgaagtgacctgcgtggtggtggatgtgtctcacgaggaccctgaagtgaagttcaattggtacgtggacggcgtggaagtgcacaacgccaagaccaagcctagagaggaacagtacaacagcacctacagagtggtgtccgtgctgaccgtgctgcaccaggattggctgaacggcaaagagtacaagtgcaaggtgtccaacaaggccctgcctgcccctgaggaaaagaccatcagcaaggccaagggccagcctagggaaccccaggtttacacactgcctccaagccgcgacgaactgaccaagaaccaggtgtccctgacctgcctcgtgaagggcttctacccttccgatatcgccgtggaatgggagagcaatggccagcctgagaacaactacaagacaacccctcctgtgctggacagcgacggctcattcttcctgtacagcaagctgaccgtggacaagtccagatggcagcagggcaacgtgttcagctgtagcgtgctgcacgaagccctgcacagccactacacccagaaaagcctgtctctgagccccggcaaatgataa

SEQ ID NO: 389 - RNA, 1611 nt, synthetic construct
  source 1..1611: mol_type = other RNA
atggattggatttggagaatcctgttcctcgtgggcgccgctaccggagcccactcccaaggcagactgtttcagtctggcgccgaagtgaaaagaccaggcgcctctgtgcggatcagctgcagagctgacgacgacccctacaccgacgacgataccttcaccaagtactggacccactggatcagacaggcccctggacaaagacctgagtggctgggagtgatcagccctcacttcgccagacctatctacagctacaagttccgggacagactgaccctgaccagagacagctctctgaccgccgtgtacctggaactgaagggcctgcagcctgacgacagcggcatctacttttgcgccagagatcccttcggcgacagagcccctcactacaactaccacatggacgtgtggggcggaggcacagccgtgatagtgtcttccggcggcggaggaagcggaggcgggggttctggcggtggtggctctggtggcggaggctcaggcggtggcggatctgaagttgtgctgacacagagccctgccatcctgagtgtgtccccaggcgatagagtgatcctgtcctgcagagcctctcagggcctcgattcttctcacctggcctggtacagattcaagcggggacagatccccacactggtcatcttcggcaccagcaacagagccagaggcacccctgatagattttccggctctggcagcggagccgacttcaccctgacaatcagcagagtggaacccgaggacttcgccacctactactgccagagatacggcggcacccctatcacatttggcggcggaaccacactggacaagaaaggcggaggtggaagtggtggtggcggtagcggaggcggtgggtccggaggtggtggatctgaacctaagagcagcgacaagacccacacctgtcctccatgtcctgctccagaactgctggccggaccttccgtgttcctgtttcctccaaagcctaaggacaccctgatgatcagcagaacccctgaagtgacctgcgtggtggtggatgtgtctcacgaggaccctgaagtgaagttcaattggtacgtggacggcgtggaagtgcacaacgccaagaccaagcctagagaggaacagtacaacagcacctacagagtggtgtccgtgctgaccgtgctgcaccaggattggctgaacggcaaagagtacaagtgcaaggtgtccaacaaggccctgcctgcccctatcgaaaagaccatcagcaaggccaagggccagcctagggaaccccaggtttacacactgcctccaagccgcgacgaactgaccaagaaccaggtgtccctgacctgcctcgtgaagggcttctacccttccgatatcgccgtggaatgggagagcaatggccagcctgagaacaactacaagacaacccctcctgtgctggacagcgacggctcattcttcctgtacagcaagctgaccgtggacaagtccagatggcagcagggcaacgtgttcagctgtagcgtgctgcacgaagccctgcacagccactacacccagaaaagcctgtctctgagccccggcaaatgataa

SEQ ID NO: 390 - RNA, 1611 nt, synthetic construct
  source 1..1611: mol_type = other RNA
atggattggatttggagaatcctgttcctcgtgggcgccgctaccggagcccactcccaaggcagactgtttcagtctggcgccgaagtgaaaagaccaggcgcctctgtgcggatcagctgcagagctgacgacgacccctacaccgacgacgataccttcaccaagtactggacccactggatcagacaggcccctggacaaagacctgagtggctgggagtgatcagccctcacttcgccagacctatctacagctacaagttccgggacagactgaccctgaccagagacagctctctgaccgccgtgtacctggaactgaagggcctgcagcctgacgacagcggcatctacttttgcgccagagatcccttcggcgacagagcccctcactacaactaccacatggacgtgtggggcggaggcacagccgtgatagtgtcttccggcggcggaggaagcggaggcgggggttctggcggtggtggctctggtggcggaggctcaggcggtggcggatctgaagttgtgctgacacagagccctgccatcctgagtgtgtccccaggcgatagagtgatcctgtcctgcagagcctctcagggcctcgattcttctcacctggcctggtacagattcaagcggggacagatccccacactggtcatcttcggcaccagcaacagagccagaggcacccctgatagattttccggctctggcagcggagccgacttcaccctgacaatcagcagagtggaacccgaggacttcgccacctactactgccagagatacggcggcacccctatcacatttggcggcggaaccacactggacaagaaaggcggaggtggaagtggtggtggcggtagcggaggcggtgggtccggaggtggtggatctgaacctaagagcagcgacaagacccacacctgtcctccatgtcctgctccagaactgctgggcggaccttccgtgttcctgtttcctccaaagcctaaggacaccctgatgatcagcagaacccctgaagtgacctgcgtggtggtggatgtgtctcacgaggaccctgaagtgaagttcaattggtacgtggacggcgtggaagtgcacaacgccaagaccaagcctagagaggaacagtacaacagcacctacagagtggtgtccgtgctgaccgtgctgcaccaggattggctgaacggcaaagagtacaagtgcaaggtgtccaacaaggccctgcctgcccctgaggaaaagaccatcagcaaggccaagggccagcctagggaaccccaggtttacacactgcctccaagccgcgacgaactgaccaagaaccaggtgtccctgacctgcctcgtgaagggcttctacccttccgatatcgccgtggaatgggagagcaatggccagcctgagaacaactacaagacaacccctcctgtgctggacagcgacggctcattcttcctgtacagcaagctgaccgtggacaagtccagatggcagcagggcaacgtgttcagctgtagcgtgctgcacgaagccctgcacagccactacacccagaaaagcctgtctctgagccccggcaaatgataa

SEQ ID NO: 391 - RNA, 1611 nt, synthetic construct
  source 1..1611: mol_type = other RNA
atggattggatttggagaatcctgttcctcgtgggcgccgctaccggagcccactcccaaggcagactgtttcagtctggcgccgaagtgaaaagaccaggcgcctctgtgcggatcagctgcagagctgacgacgacccctacaccgacgacgataccttcaccaagtactggacccactggatcagacaggcccctggacaaagacctgagtggctgggagtgatcagccctcacttcgccagacctatctacagctacaagttccgggacagactgaccctgaccagagacagctctctgaccgccgtgtacctggaactgaagggcctgcagcctgacgacagcggcatctacttttgcgccagagatcccttcggcgacagagcccctcactacaactaccacatggacgtgtggggcggaggcacagccgtgatagtgtcttccggcggcggaggaagcggaggcgggggttctggcggtggtggctctggtggcggaggctcaggcggtggcggatctgaagttgtgctgacacagagccctgccatcctgagtgtgtccccaggcgatagagtgatcctgtcctgcagagcctctcagggcctcgattcttctcacctggcctggtacagattcaagcggggacagatccccacactggtcatcttcggcaccagcaacagagccagaggcacccctgatagattttccggctctggcagcggagccgacttcaccctgacaatcagcagagtggaacccgaggacttcgccacctactactgccagagatacggcggcacccctatcacatttggcggcggaaccacactggacaagaaaggcggaggtggaagtggtggtggcggtagcggaggcggtgggtccggaggtggtggatctgaacctaagagcagcgacaagacccacacctgtcctccatgtcctgctccagaactgctcggcggaccttccgtgttcctgtttcctccaaagcctaaggacaccctgatgatcagcagaacccctgaagtgacctgcgtggtggtggatgtgtctcacgaggacccagaagtgaagttcaattggtacgtggacggcgtggaagtgcacaacgccaagaccaagcctagagaggaacagtacaacagcacctacagagtggtgtccgtgctgacagtgctgcaccaggattggctgaacggcaaagagtacaagtgcaaggtgtccaacaaggccctgcctgctcctatcgagaaaaccatcagcaaggccaagggccagcctcgcgaacctcaagtctgtacactgcctcctagccgcgacgaactgaccaagaaccaggtgtccctgagctgcgccgtgaagggcttttacccttccgatatcgccgtggaatgggagagcaatggccagcctgagaacaactacaagacaacccctcctgtgctggacagcgacggctcattcttcctggtgtccaagctgacagtggacaagagcagatggcagcagggcaacgtgttcagctgcagcgtgctgcatgaagccctgcacagccactacacccagaagtccctgtctctgagccccggcaagtgataa

SEQ ID NO: 392 - RNA, 1611 nt, synthetic construct
  source 1..1611: mol_type = other RNA
atggattggatttggagaatcctgttcctcgtgggcgccgctaccggagcccactcccaaggcagactgtttcagtctggcgccgaagtgaaaagaccaggcgcctctgtgcggatcagctgcagagctgacgacgacccctacaccgacgacgataccttcaccaagtactggacccactggatcagacaggcccctggacaaagacctgagtggctgggagtgatcagccctcacttcgccagacctatctacagctacaagttccgggacagactgaccctgaccagagacagctctctgaccgccgtgtacctggaactgaagggcctgcagcctgacgacagcggcatctacttttgcgccagagatcccttcggcgacagagcccctcactacaactaccacatggacgtgtggggcggaggcacagccgtgatagtgtcttccggcggcggaggaagcggaggcgggggttctggcggtggtggctctggtggcggaggctcaggcggtggcggatctgaagttgtgctgacacagagccctgccatcctgagtgtgtccccaggcgatagagtgatcctgtcctgcagagcctctcagggcctcgattcttctcacctggcctggtacagattcaagcggggacagatccccacactggtcatcttcggcaccagcaacagagccagaggcacccctgatagattttccggctctggcagcggagccgacttcaccctgacaatcagcagagtggaacccgaggacttcgccacctactactgccagagatacggcggcacccctatcacatttggcggcggaaccacactggacaagaaaggcggaggtggaagtggtggtggcggtagcggaggcggtgggtccggaggtggtggatctgaacctaagagcagcgacaagacccacacctgtcctccatgtcctgctccagaactgctggccggaccttccgtgttcctgtttcctccaaagcctaaggacaccctgatgatcagcagaacccctgaagtgacctgcgtggtggtggatgtgtctcacgaggaccctgaagtgaagttcaattggtacgtggacggcgtggaagtgcacaacgccaagaccaagcctagagaggaacagtacaacagcacctacagagtggtgtccgtgctgaccgtgctgcaccaggattggctgaacggcaaagagtacaagtgcaaggtgtccaacaaggccctgcctctgcctgaggaaaagaccatcagcaaggccaagggccagcctcgcgaacctcaagtctgtacactgcctcctagccgcgacgaactgaccaagaaccaggtgtccctgagctgcgccgtgaagggcttttacccttccgatatcgccgtggaatgggagagcaatggccagcctgagaacaactacaagacaacccctcctgtgctggacagcgacggctcattcttcctggtgtccaagctgacagtggacaagagcagatggcagcagggcaacgtgttcagctgcagcgtgctgcatgaagccctgcacagccactacacccagaagtccctgtctctgagccccggcaagtgataa

SEQ ID NO: 393 - RNA, 1611 nt, synthetic construct
  source 1..1611: mol_type = other RNA
atggattggatttggagaatcctgttcctcgtgggcgccgctaccggagcccactcccaaggcagactgtttcagtctggcgccgaagtgaaaagaccaggcgcctctgtgcggatcagctgcagagctgacgacgacccctacaccgacgacgataccttcaccaagtactggacccactggatcagacaggcccctggacaaagacctgagtggctgggagtgatcagccctcacttcgccagacctatctacagctacaagttccgggacagactgaccctgaccagagacagctctctgaccgccgtgtacctggaactgaagggcctgcagcctgacgacagcggcatctacttttgcgccagagatcccttcggcgacagagcccctcactacaactaccacatggacgtgtggggcggaggcacagccgtgatagtgtcttccggcggcggaggaagcggaggcgggggttctggcggtggtggctctggtggcggaggctcaggcggtggcggatctgaagttgtgctgacacagagccctgccatcctgagtgtgtccccaggcgatagagtgatcctgtcctgcagagcctctcagggcctcgattcttctcacctggcctggtacagattcaagcggggacagatccccacactggtcatcttcggcaccagcaacagagccagaggcacccctgatagattttccggctctggcagcggagccgacttcaccctgacaatcagcagagtggaacccgaggacttcgccacctactactgccagagatacggcggcacccctatcacatttggcggcggaaccacactggacaagaaaggcggaggtggaagtggtggtggcggtagcggaggcggtgggtccggaggtggtggatctgaacctaagagcagcgacaagacccacacctgtcctccatgtcctgctccagaactgctggccggaccttccgtgttcctgtttcctccaaagcctaaggacaccctgatgatcagcagaacccctgaagtgacctgcgtggtggtggatgtgtctcacgaggaccctgaagtgaagttcaattggtacgtggacggcgtggaagtgcacaacgccaagaccaagcctagagaggaacagtacaacagcacctacagagtggtgtccgtgctgaccgtgctgcaccaggattggctgaacggcaaagagtacaagtgcaaggtgtccaacaaggccctgcctgcccctgaggaaaagaccatcagcaaggccaagggccagcctcgcgaacctcaagtctgtacactgcctcctagccgcgacgaactgaccaagaaccaggtgtccctgagctgcgccgtgaagggcttttacccttccgatatcgccgtggaatgggagagcaatggccagcctgagaacaactacaagacaacccctcctgtgctggacagcgacggctcattcttcctggtgtccaagctgacagtggacaagagcagatggcagcagggcaacgtgttcagctgcagcgtgctgcatgaagccctgcacagccactacacccagaagtccctgtctctgagccccggcaagtgataa

SEQ ID NO: 394 - RNA, 1611 nt, synthetic construct
  source 1..1611: mol_type = other RNA
atggattggatttggagaatcctgttcctcgtgggcgccgctaccggagcccactcccaaggcagactgtttcagtctggcgccgaagtgaaaagaccaggcgcctctgtgcggatcagctgcagagctgacgacgacccctacaccgacgacgataccttcaccaagtactggacccactggatcagacaggcccctggacaaagacctgagtggctgggagtgatcagccctcacttcgccagacctatctacagctacaagttccgggacagactgaccctgaccagagacagctctctgaccgccgtgtacctggaactgaagggcctgcagcctgacgacagcggcatctacttttgcgccagagatcccttcggcgacagagcccctcactacaactaccacatggacgtgtggggcggaggcacagccgtgatagtgtcttccggcggcggaggaagcggaggcgggggttctggcggtggtggctctggtggcggaggctcaggcggtggcggatctgaagttgtgctgacacagagccctgccatcctgagtgtgtccccaggcgatagagtgatcctgtcctgcagagcctctcagggcctcgattcttctcacctggcctggtacagattcaagcggggacagatccccacactggtcatcttcggcaccagcaacagagccagaggcacccctgatagattttccggctctggcagcggagccgacttcaccctgacaatcagcagagtggaacccgaggacttcgccacctactactgccagagatacggcggcacccctatcacatttggcggcggaaccacactggacaagaaaggcggaggtggaagtggtggtggcggtagcggaggcggtgggtccggaggtggtggatctgaacctaagagcagcgacaagacccacacctgtcctccatgtcctgctccagaactgctggccggaccttccgtgttcctgtttcctccaaagcctaaggacaccctgatgatcagcagaacccctgaagtgacctgcgtggtggtggatgtgtctcacgaggaccctgaagtgaagttcaattggtacgtggacggcgtggaagtgcacaacgccaagaccaagcctagagaggaacagtacaacagcacctacagagtggtgtccgtgctgaccgtgctgcaccaggattggctgaacggcaaagagtacaagtgcaaggtgtccaacaaggccctgcctgcccctatcgaaaagaccatcagcaaggccaagggccagcctcgcgaacctcaagtctgtacactgcctcctagccgcgacgaactgaccaagaaccaggtgtccctgagctgcgccgtgaagggcttttacccttccgatatcgccgtggaatgggagagcaatggccagcctgagaacaactacaagacaacccctcctgtgctggacagcgacggctcattcttcctggtgtccaagctgacagtggacaagagcagatggcagcagggcaacgtgttcagctgcagcgtgctgcatgaagccctgcacagccactacacccagaagtccctgtctctgagccccggcaagtgataa

SEQ ID NO: 395 - RNA, 1611 nt, synthetic construct
  source 1..1611: mol_type = other RNA
atggattggatttggagaatcctgttcctcgtgggcgccgctaccggagcccactcccaaggcagactgtttcagtctggcgccgaagtgaaaagaccaggcgcctctgtgcggatcagctgcagagctgacgacgacccctacaccgacgacgataccttcaccaagtactggacccactggatcagacaggcccctggacaaagacctgagtggctgggagtgatcagccctcacttcgccagacctatctacagctacaagttccgggacagactgaccctgaccagagacagctctctgaccgccgtgtacctggaactgaagggcctgcagcctgacgacagcggcatctacttttgcgccagagatcccttcggcgacagagcccctcactacaactaccacatggacgtgtggggcggaggcacagccgtgatagtgtcttccggcggcggaggaagcggaggcgggggttctggcggtggtggctctggtggcggaggctcaggcggtggcggatctgaagttgtgctgacacagagccctgccatcctgagtgtgtccccaggcgatagagtgatcctgtcctgcagagcctctcagggcctcgattcttctcacctggcctggtacagattcaagcggggacagatccccacactggtcatcttcggcaccagcaacagagccagaggcacccctgatagattttccggctctggcagcggagccgacttcaccctgacaatcagcagagtggaacccgaggacttcgccacctactactgccagagatacggcggcacccctatcacatttggcggcggaaccacactggacaagaaaggcggaggtggaagtggtggtggcggtagcggaggcggtgggtccggaggtggtggatctgaacctaagagcagcgacaagacccacacctgtcctccatgtcctgctccagaactgctgggcggaccttccgtgttcctgtttcctccaaagcctaaggacaccctgatgatcagcagaacccctgaagtgacctgcgtggtggtggatgtgtctcacgaggaccctgaagtgaagttcaattggtacgtggacggcgtggaagtgcacaacgccaagaccaagcctagagaggaacagtacaacagcacctacagagtggtgtccgtgctgaccgtgctgcaccaggattggctgaacggcaaagagtacaagtgcaaggtgtccaacaaggccctgcctgcccctgaggaaaagaccatcagcaaggccaagggccagcctcgcgaacctcaagtctgtacactgcctcctagccgcgacgaactgaccaagaaccaggtgtccctgagctgcgccgtgaagggcttttacccttccgatatcgccgtggaatgggagagcaatggccagcctgagaacaactacaagacaacccctcctgtgctggacagcgacggctcattcttcctggtgtccaagctgacagtggacaagagcagatggcagcagggcaacgtgttcagctgcagcgtgctgcatgaagccctgcacagccactacacccagaagtccctgtctctgagccccggcaagtgataa

SEQ ID NO: 396 - RNA, 1611 nt, synthetic construct
  source 1..1611: mol_type = other RNA
atggattggatttggagaatcctgttcctcgtgggcgccgctaccggagcccactcccaaggcagactgtttcagtctggcgccgaagtgaaaagaccaggcgcctctgtgcggatcagctgcagagctgacgacgacccctacaccgacgacgataccttcaccaagtactggacccactggatcagacaggcccctggacaaagacctgagtggctgggagtgatcagccctcacttcgccagacctatctacagctacaagttccgggacagactgaccctgaccagagacagctctctgaccgccgtgtacctggaactgaagggcctgcagcctgacgacagcggcatctacttttgcgccagagatcccttcggcgacagagcccctcactacaactaccacatggacgtgtggggcggaggcacagccgtgatagtgtcttccggcggcggaggaagcggaggcgggggttctggcggtggtggctctggtggcggaggctcaggcggtggcggatctgaagttgtgctgacacagagccctgccatcctgagtgtgtccccaggcgatagagtgatcctgtcctgcagagcctctcagggcctcgattcttctcacctggcctggtacagattcaagcggggacagatccccacactggtcatcttcggcaccagcaacagagccagaggcacccctgatagattttccggctctggcagcggagccgacttcaccctgacaatcagcagagtggaacccgaggacttcgccacctactactgccagagatacggcggcacccctatcacatttggcggcggaaccacactggacaagaaaggcggaggtggaagtggtggtggcggtagcggaggcggtgggtccggaggtggtggatctgaacctaagagcagcgacaagacccacacctgtcctccatgtcctgctccagaactgctcggcggaccttccgtgttcctgtttcctccaaagcctaaggacaccctgatgatcagcagaacccctgaagtgacctgcgtggtggtggatgtgtctcacgaggacccagaagtgaagttcaattggtacgtggacggcgtggaagtgcacaacgccaagaccaagcctagagaggaacagtacaacagcacctacagagtggtgtccgtgctgacagtgctgcaccaggattggctgaacggcaaagagtacaagtgcaaggtgtccaacaaggccctgcctgctcctatcgagaaaaccatcagcaaggccaagggccagcctagggaaccccaggtttacaccctgcctccatgccgcgacgaactgaccaagaaccaggtgtccctgtggtgcctggtcaagggcttctacccttccgatatcgccgtggaatgggagagcaatggccagcctgagaacaactacaagacaacccctcctgtgctggacagcgacggctcattcttcctgtacagcaagctgacagtggacaagagcagatggcagcagggcaacgtgttcagctgcagcgtgctgcatgaagccctgcacagccactacacccagaagtccctgtctctgagccccggcaagtgataa

SEQ ID NO: 397 - RNA, 1611 nt, synthetic construct
  source 1..1611: mol_type = other RNA
atggattggatttggagaatcctgttcctcgtgggcgccgctaccggagcccactcccaaggcagactgtttcagtctggcgccgaagtgaaaagaccaggcgcctctgtgcggatcagctgcagagctgacgacgacccctacaccgacgacgataccttcaccaagtactggacccactggatcagacaggcccctggacaaagacctgagtggctgggagtgatcagccctcacttcgccagacctatctacagctacaagttccgggacagactgaccctgaccagagacagctctctgaccgccgtgtacctggaactgaagggcctgcagcctgacgacagcggcatctacttttgcgccagagatcccttcggcgacagagcccctcactacaactaccacatggacgtgtggggcggaggcacagccgtgatagtgtcttccggcggcggaggaagcggaggcgggggttctggcggtggtggctctggtggcggaggctcaggcggtggcggatctgaagttgtgctgacacagagccctgccatcctgagtgtgtccccaggcgatagagtgatcctgtcctgcagagcctctcagggcctcgattcttctcacctggcctggtacagattcaagcggggacagatccccacactggtcatcttcggcaccagcaacagagccagaggcacccctgatagattttccggctctggcagcggagccgacttcaccctgacaatcagcagagtggaacccgaggacttcgccacctactactgccagagatacggcggcacccctatcacatttggcggcggaaccacactggacaagaaaggcggaggtggaagtggtggtggcggtagcggaggcggtgggtccggaggtggtggatctgaacctaagagcagcgacaagacccacacctgtcctccatgtcctgctccagaactgctggccggaccttccgtgttcctgtttcctccaaagcctaaggacaccctgatgatcagcagaacccctgaagtgacctgcgtggtggtggatgtgtctcacgaggaccctgaagtgaagttcaattggtacgtggacggcgtggaagtgcacaacgccaagaccaagcctagagaggaacagtacaacagcacctacagagtggtgtccgtgctgaccgtgctgcaccaggattggctgaacggcaaagagtacaagtgcaaggtgtccaacaaggccctgcctctgcctgaggaaaagaccatcagcaaggccaagggccagcctagggaaccccaggtttacaccctgcctccatgccgcgacgaactgaccaagaaccaggtgtccctgtggtgcctggtcaagggcttctacccttccgatatcgccgtggaatgggagagcaatggccagcctgagaacaactacaagacaacccctcctgtgctggacagcgacggctcattcttcctgtacagcaagctgacagtggacaagagcagatggcagcagggcaacgtgttcagctgcagcgtgctgcatgaagccctgcacagccactacacccagaagtccctgtctctgagccccggcaagtgataa

SEQ ID NO: 398 - RNA, 1611 nt, synthetic construct
  source 1..1611: mol_type = other RNA
atggattggatttggagaatcctgttcctcgtgggcgccgctaccggagcccactcccaaggcagactgtttcagtctggcgccgaagtgaaaagaccaggcgcctctgtgcggatcagctgcagagctgacgacgacccctacaccgacgacgataccttcaccaagtactggacccactggatcagacaggcccctggacaaagacctgagtggctgggagtgatcagccctcacttcgccagacctatctacagctacaagttccgggacagactgaccctgaccagagacagctctctgaccgccgtgtacctggaactgaagggcctgcagcctgacgacagcggcatctacttttgcgccagagatcccttcggcgacagagcccctcactacaactaccacatggacgtgtggggcggaggcacagccgtgatagtgtcttccggcggcggaggaagcggaggcgggggttctggcggtggtggctctggtggcggaggctcaggcggtggcggatctgaagttgtgctgacacagagccctgccatcctgagtgtgtccccaggcgatagagtgatcctgtcctgcagagcctctcagggcctcgattcttctcacctggcctggtacagattcaagcggggacagatccccacactggtcatcttcggcaccagcaacagagccagaggcacccctgatagattttccggctctggcagcggagccgacttcaccctgacaatcagcagagtggaacccgaggacttcgccacctactactgccagagatacggcggcacccctatcacatttggcggcggaaccacactggacaagaaaggcggaggtggaagtggtggtggcggtagcggaggcggtgggtccggaggtggtggatctgaacctaagagcagcgacaagacccacacctgtcctccatgtcctgctccagaactgctggccggaccttccgtgttcctgtttcctccaaagcctaaggacaccctgatgatcagcagaacccctgaagtgacctgcgtggtggtggatgtgtctcacgaggaccctgaagtgaagttcaattggtacgtggacggcgtggaagtgcacaacgccaagaccaagcctagagaggaacagtacaacagcacctacagagtggtgtccgtgctgaccgtgctgcaccaggattggctgaacggcaaagagtacaagtgcaaggtgtccaacaaggccctgcctgcccctgaggaaaagaccatcagcaaggccaagggccagcctagggaaccccaggtttacaccctgcctccatgccgcgacgaactgaccaagaaccaggtgtccctgtggtgcctggtcaagggcttctacccttccgatatcgccgtggaatgggagagcaatggccagcctgagaacaactacaagacaacccctcctgtgctggacagcgacggctcattcttcctgtacagcaagctgacagtggacaagagcagatggcagcagggcaacgtgttcagctgcagcgtgctgcatgaagccctgcacagccactacacccagaagtccctgtctctgagccccggcaagtgataa

SEQ ID NO: 399 - RNA, 1611 nt, synthetic construct
  source 1..1611: mol_type = other RNA
atggattggatttggagaatcctgttcctcgtgggcgccgctaccggagcccactcccaaggcagactgtttcagtctggcgccgaagtgaaaagaccaggcgcctctgtgcggatcagctgcagagctgacgacgacccctacaccgacgacgataccttcaccaagtactggacccactggatcagacaggcccctggacaaagacctgagtggctgggagtgatcagccctcacttcgccagacctatctacagctacaagttccgggacagactgaccctgaccagagacagctctctgaccgccgtgtacctggaactgaagggcctgcagcctgacgacagcggcatctacttttgcgccagagatcccttcggcgacagagcccctcactacaactaccacatggacgtgtggggcggaggcacagccgtgatagtgtcttccggcggcggaggaagcggaggcgggggttctggcggtggtggctctggtggcggaggctcaggcggtggcggatctgaagttgtgctgacacagagccctgccatcctgagtgtgtccccaggcgatagagtgatcctgtcctgcagagcctctcagggcctcgattcttctcacctggcctggtacagattcaagcggggacagatccccacactggtcatcttcggcaccagcaacagagccagaggcacccctgatagattttccggctctggcagcggagccgacttcaccctgacaatcagcagagtggaacccgaggacttcgccacctactactgccagagatacggcggcacccctatcacatttggcggcggaaccacactggacaagaaaggcggaggtggaagtggtggtggcggtagcggaggcggtgggtccggaggtggtggatctgaacctaagagcagcgacaagacccacacctgtcctccatgtcctgctccagaactgctggccggaccttccgtgttcctgtttcctccaaagcctaaggacaccctgatgatcagcagaacccctgaagtgacctgcgtggtggtggatgtgtctcacgaggaccctgaagtgaagttcaattggtacgtggacggcgtggaagtgcacaacgccaagaccaagcctagagaggaacagtacaacagcacctacagagtggtgtccgtgctgaccgtgctgcaccaggattggctgaacggcaaagagtacaagtgcaaggtgtccaacaaggccctgcctgcccctatcgaaaagaccatcagcaaggccaagggccagcctagggaaccccaggtttacaccctgcctccatgccgcgacgaactgaccaagaaccaggtgtccctgtggtgcctggtcaagggcttctacccttccgatatcgccgtggaatgggagagcaatggccagcctgagaacaactacaagacaacccctcctgtgctggacagcgacggctcattcttcctgtacagcaagctgacagtggacaagagcagatggcagcagggcaacgtgttcagctgcagcgtgctgcatgaagccctgcacagccactacacccagaagtccctgtctctgagccccggcaagtgataa

SEQ ID NO: 400 - RNA, 1611 nt, synthetic construct
  source 1..1611: mol_type = other RNA
atggattggatttggagaatcctgttcctcgtgggcgccgctaccggagcccactcccaaggcagactgtttcagtctggcgccgaagtgaaaagaccaggcgcctctgtgcggatcagctgcagagctgacgacgacccctacaccgacgacgataccttcaccaagtactggacccactggatcagacaggcccctggacaaagacctgagtggctgggagtgatcagccctcacttcgccagacctatctacagctacaagttccgggacagactgaccctgaccagagacagctctctgaccgccgtgtacctggaactgaagggcctgcagcctgacgacagcggcatctacttttgcgccagagatcccttcggcgacagagcccctcactacaactaccacatggacgtgtggggcggaggcacagccgtgatagtgtcttccggcggcggaggaagcggaggcgggggttctggcggtggtggctctggtggcggaggctcaggcggtggcggatctgaagttgtgctgacacagagccctgccatcctgagtgtgtccccaggcgatagagtgatcctgtcctgcagagcctctcagggcctcgattcttctcacctggcctggtacagattcaagcggggacagatccccacactggtcatcttcggcaccagcaacagagccagaggcacccctgatagattttccggctctggcagcggagccgacttcaccctgacaatcagcagagtggaacccgaggacttcgccacctactactgccagagatacggcggcacccctatcacatttggcggcggaaccacactggacaagaaaggcggaggtggaagtggtggtggcggtagcggaggcggtgggtccggaggtggtggatctgaacctaagagcagcgacaagacccacacctgtcctccatgtcctgctccagaactgctgggcggaccttccgtgttcctgtttcctccaaagcctaaggacaccctgatgatcagcagaacccctgaagtgacctgcgtggtggtggatgtgtctcacgaggaccctgaagtgaagttcaattggtacgtggacggcgtggaagtgcacaacgccaagaccaagcctagagaggaacagtacaacagcacctacagagtggtgtccgtgctgaccgtgctgcaccaggattggctgaacggcaaagagtacaagtgcaaggtgtccaacaaggccctgcctgcccctgaggaaaagaccatcagcaaggccaagggccagcctagggaaccccaggtttacaccctgcctccatgccgcgacgaactgaccaagaaccaggtgtccctgtggtgcctggtcaagggcttctacccttccgatatcgccgtggaatgggagagcaatggccagcctgagaacaactacaagacaacccctcctgtgctggacagcgacggctcattcttcctgtacagcaagctgacagtggacaagagcagatggcagcagggcaacgtgttcagctgcagcgtgctgcatgaagccctgcacagccactacacccagaagtccctgtctctgagccccggcaagtgataa

SEQ ID NO: 401 - RNA, 1611 nt, synthetic construct
  source 1..1611: mol_type = other RNA
atggattggatttggagaatcctgttcctcgtgggcgccgctaccggagcccactccgaagtggtgctgacacagagccccgccatcctgagtgttagccctggcgatagagtgatcctgagctgcagagcctctcagggcctcgattcttctcacctggcctggtacagattcaagcggggacagatccccacactggtcatcttcggcaccagcaacagagccagaggcacccctgatagattttccggctctggcagcggagccgacttcaccctgacaatcagcagagtggaacccgaggacttcgccacctactactgccagagatacggcggcacccctatcacatttggcggcggaaccacactggacaagaaaggcggcggaggaagcggaggcggaggttctggtggtggtggctctggtggcggaggctcaggcggtggcggatctcaaggcagactgtttcagtctggcgccgaagtgaaaagaccaggcgcctctgtgcggatcagctgtagagccgacgacgacccctacaccgacgatgacaccttcaccaagtactggacccactggatcagacaggcccctggacaaagacctgagtggctgggagtgatcagccctcacttcgccagacctatctacagctacaagttccgggacagactgaccctgaccagagacagctctctgaccgccgtgtacctggaactgaagggcctgcagcctgacgacagcggcatctacttttgcgccagagatcccttcggcgacagggctccccactacaactaccacatggatgtgtggggaggcggcacagccgtgattgtgtcttccggcggcggaggaagcggaggcggaggttctggtggcggaggctcaggcggtggcggatctgaacctaagagcagcgacaagacccacacctgtcctccatgtcctgctccagaactgctcggcggaccttccgtgttcctgtttcctccaaagcctaaggacaccctgatgatcagcagaacccctgaagtgacctgcgtggtggtggatgtgtctcacgaggacccagaagtgaagttcaattggtacgtggacggcgtggaagtgcacaacgccaagaccaagcctagagaggaacagtacaacagcacctacagagtggtgtccgtgctgacagtgctgcaccaggattggctgaacggcaaagagtacaagtgcaaggtgtccaacaaggccctgcctgctcctatcgagaaaaccatcagcaaggccaagggccagcctagggaaccccaggtttacacactgcctccaagccgcgaggaaatgaccaagaaccaggtgtccctgacctgcctcgtgaagggcttctacccttccgatatcgccgtggaatgggagagcaatggccagcctgagaacaactacaagacaacccctcctgtgctggacagcgacggctcattcttcctgtacagcaagctgactgtggataagtcccggtggcagcagggcaacgtgttcagctgttctgtgatgcacgaagccctgcacaaccactacacccagaaaagcctgtctctgagccccggcaagtgataa

SEQ ID NO: 402 - RNA, 1611 nt, synthetic construct
  source 1..1611: mol_type = other RNA
atggattggatttggagaatcctgttcctcgtgggcgccgctaccggagcccactccgaagtggtgctgacacagagccccgccatcctgagtgttagccctggcgatagagtgatcctgagctgcagagcctctcagggcctcgattcttctcacctggcctggtacagattcaagcggggacagatccccacactggtcatcttcggcaccagcaacagagccagaggcacccctgatagattttccggctctggcagcggagccgacttcaccctgacaatcagcagagtggaacccgaggacttcgccacctactactgccagagatacggcggcacccctatcacatttggcggcggaaccacactggacaagaaaggcggcggaggaagcggaggcggaggttctggtggtggtggctctggtggcggaggctcaggcggtggcggatctcaaggcagactgtttcagtctggcgccgaagtgaaaagaccaggcgcctctgtgcggatcagctgtagagccgacgacgacccctacaccgacgatgacaccttcaccaagtactggacccactggatcagacaggcccctggacaaagacctgagtggctgggagtgatcagccctcacttcgccagacctatctacagctacaagttccgggacagactgaccctgaccagagacagctctctgaccgccgtgtacctggaactgaagggcctgcagcctgacgacagcggcatctacttttgcgccagagatcccttcggcgacagggctccccactacaactaccacatggatgtgtggggaggcggcacagccgtgattgtgtcttccggcggcggaggaagcggaggcggaggttctggtggcggaggctcaggcggtggcggatctgaacctaagagcagcgacaagacccacacctgtcctccatgtcctgctccagaactgctcggcggaccttccgtgttcctgtttcctccaaagcctaaggacaccctgatgatcagcagaacccctgaagtgacctgcgtggtggtggatgtgtctcacgaggacccagaagtgaagttcaattggtacgtggacggcgtggaagtgcacaacgccaagaccaagcctagagaggaacagtacaacagcacctacagagtggtgtccgtgctgacagtgctgcaccaggattggctgaacggcaaagagtacaagtgcaaggtgtccaacaaggccctgcctgctcctatcgagaaaaccatcagcaaggccaagggccagcctagggaaccccaggtttacacactgcctccaagccgcgaggaaatgaccaagaaccaggtgtccctgacctgcctcgtgaagggcttctacccttccgatatcgccgtggaatgggagagcaatggccagcctgagaacaactacaagacaacccctcctgtgctggacagcgacggctcattcttcctgtacagcaagctgaccgtggacaagtccagatggcagcagggcaacgtgttcagctgtagcgtgctgcacgaagccctgcacagccactacacccagaaaagcctgtctctgagccccggcaaatgataa

SEQ ID NO: 403 - RNA, 1611 nt, synthetic construct
  source 1..1611: mol_type = other RNA
atggattggatttggagaatcctgttcctcgtgggcgccgctaccggagcccactccgaagtggtgctgacacagagccccgccatcctgagtgttagccctggcgatagagtgatcctgagctgcagagcctctcagggcctcgattcttctcacctggcctggtacagattcaagcggggacagatccccacactggtcatcttcggcaccagcaacagagccagaggcacccctgatagattttccggctctggcagcggagccgacttcaccctgacaatcagcagagtggaacccgaggacttcgccacctactactgccagagatacggcggcacccctatcacatttggcggcggaaccacactggacaagaaaggcggcggaggaagcggaggcggaggttctggtggtggtggctctggtggcggaggctcaggcggtggcggatctcaaggcagactgtttcagtctggcgccgaagtgaaaagaccaggcgcctctgtgcggatcagctgtagagccgacgacgacccctacaccgacgatgacaccttcaccaagtactggacccactggatcagacaggcccctggacaaagacctgagtggctgggagtgatcagccctcacttcgccagacctatctacagctacaagttccgggacagactgaccctgaccagagacagctctctgaccgccgtgtacctggaactgaagggcctgcagcctgacgacagcggcatctacttttgcgccagagatcccttcggcgacagggctccccactacaactaccacatggatgtgtggggaggcggcacagccgtgattgtgtcttccggcggcggaggaagcggaggcggaggttctggtggcggaggctcaggcggtggcggatctgaacctaagagcagcgacaagacccacacctgtcctccatgtcctgctccagaactgctggccggaccttccgtgttcctgtttcctccaaagcctaaggacaccctgatgatcagcagaacccctgaagtgacctgcgtggtggtggatgtgtctcacgaggaccctgaagtgaagttcaattggtacgtggacggcgtggaagtgcacaacgccaagaccaagcctagagaggaacagtacaacagcacctacagagtggtgtccgtgctgaccgtgctgcaccaggattggctgaacggcaaagagtacaagtgcaaggtgtccaacaaggccctgcctctgcctgaggaaaagaccatcagcaaggccaagggccagcctagggaaccccaggtttacacactgcctccaagccgcgaggaaatgaccaagaaccaggtgtccctgacctgcctcgtgaagggcttctacccttccgatatcgccgtggaatgggagagcaatggccagcctgagaacaactacaagacaacccctcctgtgctggacagcgacggctcattcttcctgtacagcaagctgaccgtggacaagtccagatggcagcagggcaacgtgttcagctgtagcgtgctgcacgaagccctgcacagccactacacccagaaaagcctgtctctgagccccggcaaatgataa

SEQ ID NO: 404 - RNA, 1611 nt, synthetic construct
  source 1..1611: mol_type = other RNA
atggattggatttggagaatcctgttcctcgtgggcgccgctaccggagcccactccgaagtggtgctgacacagagccccgccatcctgagtgttagccctggcgatagagtgatcctgagctgcagagcctctcagggcctcgattcttctcacctggcctggtacagattcaagcggggacagatccccacactggtcatcttcggcaccagcaacagagccagaggcacccctgatagattttccggctctggcagcggagccgacttcaccctgacaatcagcagagtggaacccgaggacttcgccacctactactgccagagatacggcggcacccctatcacatttggcggcggaaccacactggacaagaaaggcggcggaggaagcggaggcggaggttctggtggtggtggctctggtggcggaggctcaggcggtggcggatctcaaggcagactgtttcagtctggcgccgaagtgaaaagaccaggcgcctctgtgcggatcagctgtagagccgacgacgacccctacaccgacgatgacaccttcaccaagtactggacccactggatcagacaggcccctggacaaagacctgagtggctgggagtgatcagccctcacttcgccagacctatctacagctacaagttccgggacagactgaccctgaccagagacagctctctgaccgccgtgtacctggaactgaagggcctgcagcctgacgacagcggcatctacttttgcgccagagatcccttcggcgacagggctccccactacaactaccacatggatgtgtggggaggcggcacagccgtgattgtgtcttccggcggcggaggaagcggaggcggaggttctggtggcggaggctcaggcggtggcggatctgaacctaagagcagcgacaagacccacacctgtcctccatgtcctgctccagaactgctggccggaccttccgtgttcctgtttcctccaaagcctaaggacaccctgatgatcagcagaacccctgaagtgacctgcgtggtggtggatgtgtctcacgaggaccctgaagtgaagttcaattggtacgtggacggcgtggaagtgcacaacgccaagaccaagcctagagaggaacagtacaacagcacctacagagtggtgtccgtgctgaccgtgctgcaccaggattggctgaacggcaaagagtacaagtgcaaggtgtccaacaaggccctgcctgcccctgaggaaaagaccatcagcaaggccaagggccagcctagggaaccccaggtttacacactgcctccaagccgcgaggaaatgaccaagaaccaggtgtccctgacctgcctcgtgaagggcttctacccttccgatatcgccgtggaatgggagagcaatggccagcctgagaacaactacaagacaacccctcctgtgctggacagcgacggctcattcttcctgtacagcaagctgaccgtggacaagtccagatggcagcagggcaacgtgttcagctgtagcgtgctgcacgaagccctgcacagccactacacccagaaaagcctgtctctgagccccggcaaatgataa

SEQ ID NO: 405 - RNA, 1611 nt, synthetic construct
  source 1..1611: mol_type = other RNA
atggattggatttggagaatcctgttcctcgtgggcgccgctaccggagcccactccgaagtggtgctgacacagagccccgccatcctgagtgttagccctggcgatagagtgatcctgagctgcagagcctctcagggcctcgattcttctcacctggcctggtacagattcaagcggggacagatccccacactggtcatcttcggcaccagcaacagagccagaggcacccctgatagattttccggctctggcagcggagccgacttcaccctgacaatcagcagagtggaacccgaggacttcgccacctactactgccagagatacggcggcacccctatcacatttggcggcggaaccacactggacaagaaaggcggcggaggaagcggaggcggaggttctggtggtggtggctctggtggcggaggctcaggcggtggcggatctcaaggcagactgtttcagtctggcgccgaagtgaaaagaccaggcgcctctgtgcggatcagctgtagagccgacgacgacccctacaccgacgatgacaccttcaccaagtactggacccactggatcagacaggcccctggacaaagacctgagtggctgggagtgatcagccctcacttcgccagacctatctacagctacaagttccgggacagactgaccctgaccagagacagctctctgaccgccgtgtacctggaactgaagggcctgcagcctgacgacagcggcatctacttttgcgccagagatcccttcggcgacagggctccccactacaactaccacatggatgtgtggggaggcggcacagccgtgattgtgtcttccggcggcggaggaagcggaggcggaggttctggtggcggaggctcaggcggtggcggatctgaacctaagagcagcgacaagacccacacctgtcctccatgtcctgctccagaactgctggccggaccttccgtgttcctgtttcctccaaagcctaaggacaccctgatgatcagcagaacccctgaagtgacctgcgtggtggtggatgtgtctcacgaggaccctgaagtgaagttcaattggtacgtggacggcgtggaagtgcacaacgccaagaccaagcctagagaggaacagtacaacagcacctacagagtggtgtccgtgctgaccgtgctgcaccaggattggctgaacggcaaagagtacaagtgcaaggtgtccaacaaggccctgcctgcccctatcgaaaagaccatcagcaaggccaagggccagcctagggaaccccaggtttacacactgcctccaagccgcgaggaaatgaccaagaaccaggtgtccctgacctgcctcgtgaagggcttctacccttccgatatcgccgtggaatgggagagcaatggccagcctgagaacaactacaagacaacccctcctgtgctggacagcgacggctcattcttcctgtacagcaagctgaccgtggacaagtccagatggcagcagggcaacgtgttcagctgtagcgtgctgcacgaagccctgcacagccactacacccagaaaagcctgtctctgagccccggcaaatgataa

SEQ ID NO: 406 - RNA, 1611 nt, synthetic construct
  source 1..1611: mol_type = other RNA
atggattggatttggagaatcctgttcctcgtgggcgccgctaccggagcccactccgaagtggtgctgacacagagccccgccatcctgagtgttagccctggcgatagagtgatcctgagctgcagagcctctcagggcctcgattcttctcacctggcctggtacagattcaagcggggacagatccccacactggtcatcttcggcaccagcaacagagccagaggcacccctgatagattttccggctctggcagcggagccgacttcaccctgacaatcagcagagtggaacccgaggacttcgccacctactactgccagagatacggcggcacccctatcacatttggcggcggaaccacactggacaagaaaggcggcggaggaagcggaggcggaggttctggtggtggtggctctggtggcggaggctcaggcggtggcggatctcaaggcagactgtttcagtctggcgccgaagtgaaaagaccaggcgcctctgtgcggatcagctgtagagccgacgacgacccctacaccgacgatgacaccttcaccaagtactggacccactggatcagacaggcccctggacaaagacctgagtggctgggagtgatcagccctcacttcgccagacctatctacagctacaagttccgggacagactgaccctgaccagagacagctctctgaccgccgtgtacctggaactgaagggcctgcagcctgacgacagcggcatctacttttgcgccagagatcccttcggcgacagggctccccactacaactaccacatggatgtgtggggaggcggcacagccgtgattgtgtcttccggcggcggaggaagcggaggcggaggttctggtggcggaggctcaggcggtggcggatctgaacctaagagcagcgacaagacccacacctgtcctccatgtcctgctccagaactgctgggcggaccttccgtgttcctgtttcctccaaagcctaaggacaccctgatgatcagcagaacccctgaagtgacctgcgtggtggtggatgtgtctcacgaggaccctgaagtgaagttcaattggtacgtggacggcgtggaagtgcacaacgccaagaccaagcctagagaggaacagtacaacagcacctacagagtggtgtccgtgctgaccgtgctgcaccaggattggctgaacggcaaagagtacaagtgcaaggtgtccaacaaggccctgcctgcccctgaggaaaagaccatcagcaaggccaagggccagcctagggaaccccaggtttacacactgcctccaagccgcgaggaaatgaccaagaaccaggtgtccctgacctgcctcgtgaagggcttctacccttccgatatcgccgtggaatgggagagcaatggccagcctgagaacaactacaagacaacccctcctgtgctggacagcgacggctcattcttcctgtacagcaagctgaccgtggacaagtccagatggcagcagggcaacgtgttcagctgtagcgtgctgcacgaagccctgcacagccactacacccagaaaagcctgtctctgagccccggcaaatgataa

SEQ ID NO: 407 - RNA, 1611 nt, synthetic construct
  source 1..1611: mol_type = other RNA
atggattggatttggagaatcctgttcctcgtgggcgccgctaccggagcccactccgaagtggtgctgacacagagccccgccatcctgagtgttagccctggcgatagagtgatcctgagctgcagagcctctcagggcctcgattcttctcacctggcctggtacagattcaagcggggacagatccccacactggtcatcttcggcaccagcaacagagccagaggcacccctgatagattttccggctctggcagcggagccgacttcaccctgacaatcagcagagtggaacccgaggacttcgccacctactactgccagagatacggcggcacccctatcacatttggcggcggaaccacactggacaagaaaggcggcggaggaagcggaggcggaggttctggtggtggtggctctggtggcggaggctcaggcggtggcggatctcaaggcagactgtttcagtctggcgccgaagtgaaaagaccaggcgcctctgtgcggatcagctgtagagccgacgacgacccctacaccgacgatgacaccttcaccaagtactggacccactggatcagacaggcccctggacaaagacctgagtggctgggagtgatcagccctcacttcgccagacctatctacagctacaagttccgggacagactgaccctgaccagagacagctctctgaccgccgtgtacctggaactgaagggcctgcagcctgacgacagcggcatctacttttgcgccagagatcccttcggcgacagggctccccactacaactaccacatggatgtgtggggaggcggcacagccgtgattgtgtcttccggcggcggaggaagcggaggcggaggttctggtggcggaggctcaggcggtggcggatctgaacctaagagcagcgacaagacccacacctgtcctccatgtcctgctccagaactgctcggcggaccttccgtgttcctgtttcctccaaagcctaaggacaccctgatgatcagcagaacccctgaagtgacctgcgtggtggtggatgtgtctcacgaggacccagaagtgaagttcaattggtacgtggacggcgtggaagtgcacaacgccaagaccaagcctagagaggaacagtacaacagcacctacagagtggtgtccgtgctgacagtgctgcaccaggattggctgaacggcaaagagtacaagtgcaaggtgtccaacaaggccctgcctgctcctatcgagaaaaccatcagcaaggccaagggccagcctcgcgaacctcaagtctgtacactgcctcctagccgcgaggaaatgaccaagaaccaggtgtccctgagctgcgccgtgaagggcttttacccttccgatatcgccgtggaatgggagagcaatggccagcctgagaacaactacaagacaacccctcctgtgctggacagcgacggctcattcttcctggtgtccaagctgacagtggacaagagcagatggcagcagggcaacgtgttcagctgcagcgtgctgcatgaagccctgcacagccactacacccagaagtccctgtctctgagccccggcaagtgataa

SEQ ID NO: 408 - RNA, 1611 nt, synthetic construct
  source 1..1611: mol_type = other RNA
atggattggatttggagaatcctgttcctcgtgggcgccgctaccggagcccactccgaagtggtgctgacacagagccccgccatcctgagtgttagccctggcgatagagtgatcctgagctgcagagcctctcagggcctcgattcttctcacctggcctggtacagattcaagcggggacagatccccacactggtcatcttcggcaccagcaacagagccagaggcacccctgatagattttccggctctggcagcggagccgacttcaccctgacaatcagcagagtggaacccgaggacttcgccacctactactgccagagatacggcggcacccctatcacatttggcggcggaaccacactggacaagaaaggcggcggaggaagcggaggcggaggttctggtggtggtggctctggtggcggaggctcaggcggtggcggatctcaaggcagactgtttcagtctggcgccgaagtgaaaagaccaggcgcctctgtgcggatcagctgtagagccgacgacgacccctacaccgacgatgacaccttcaccaagtactggacccactggatcagacaggcccctggacaaagacctgagtggctgggagtgatcagccctcacttcgccagacctatctacagctacaagttccgggacagactgaccctgaccagagacagctctctgaccgccgtgtacctggaactgaagggcctgcagcctgacgacagcggcatctacttttgcgccagagatcccttcggcgacagggctccccactacaactaccacatggatgtgtggggaggcggcacagccgtgattgtgtcttccggcggcggaggaagcggaggcggaggttctggtggcggaggctcaggcggtggcggatctgaacctaagagcagcgacaagacccacacctgtcctccatgtcctgctccagaactgctggccggaccttccgtgttcctgtttcctccaaagcctaaggacaccctgatgatcagcagaacccctgaagtgacctgcgtggtggtggatgtgtctcacgaggaccctgaagtgaagttcaattggtacgtggacggcgtggaagtgcacaacgccaagaccaagcctagagaggaacagtacaacagcacctacagagtggtgtccgtgctgaccgtgctgcaccaggattggctgaacggcaaagagtacaagtgcaaggtgtccaacaaggccctgcctctgcctgaggaaaagaccatcagcaaggccaagggccagcctcgcgaacctcaagtctgtacactgcctcctagccgcgaggaaatgaccaagaaccaggtgtccctgagctgcgccgtgaagggcttttacccttccgatatcgccgtggaatgggagagcaatggccagcctgagaacaactacaagacaacccctcctgtgctggacagcgacggctcattcttcctggtgtccaagctgacagtggacaagagcagatggcagcagggcaacgtgttcagctgcagcgtgctgcatgaagccctgcacagccactacacccagaagtccctgtctctgagccccggcaagtgataa

SEQ ID NO: 409 - RNA, 1611 nt, synthetic construct
  source 1..1611: mol_type = other RNA
atggattggatttggagaatcctgttcctcgtgggcgccgctaccggagcccactccgaagtggtgctgacacagagccccgccatcctgagtgttagccctggcgatagagtgatcctgagctgcagagcctctcagggcctcgattcttctcacctggcctggtacagattcaagcggggacagatccccacactggtcatcttcggcaccagcaacagagccagaggcacccctgatagattttccggctctggcagcggagccgacttcaccctgacaatcagcagagtggaacccgaggacttcgccacctactactgccagagatacggcggcacccctatcacatttggcggcggaaccacactggacaagaaaggcggcggaggaagcggaggcggaggttctggtggtggtggctctggtggcggaggctcaggcggtggcggatctcaaggcagactgtttcagtctggcgccgaagtgaaaagaccaggcgcctctgtgcggatcagctgtagagccgacgacgacccctacaccgacgatgacaccttcaccaagtactggacccactggatcagacaggcccctggacaaagacctgagtggctgggagtgatcagccctcacttcgccagacctatctacagctacaagttccgggacagactgaccctgaccagagacagctctctgaccgccgtgtacctggaactgaagggcctgcagcctgacgacagcggcatctacttttgcgccagagatcccttcggcgacagggctccccactacaactaccacatggatgtgtggggaggcggcacagccgtgattgtgtcttccggcggcggaggaagcggaggcggaggttctggtggcggaggctcaggcggtggcggatctgaacctaagagcagcgacaagacccacacctgtcctccatgtcctgctccagaactgctggccggaccttccgtgttcctgtttcctccaaagcctaaggacaccctgatgatcagcagaacccctgaagtgacctgcgtggtggtggatgtgtctcacgaggaccctgaagtgaagttcaattggtacgtggacggcgtggaagtgcacaacgccaagaccaagcctagagaggaacagtacaacagcacctacagagtggtgtccgtgctgaccgtgctgcaccaggattggctgaacggcaaagagtacaagtgcaaggtgtccaacaaggccctgcctgcccctgaggaaaagaccatcagcaaggccaagggccagcctcgcgaacctcaagtctgtacactgcctcctagccgcgaggaaatgaccaagaaccaggtgtccctgagctgcgccgtgaagggcttttacccttccgatatcgccgtggaatgggagagcaatggccagcctgagaacaactacaagacaacccctcctgtgctggacagcgacggctcattcttcctggtgtccaagctgacagtggacaagagcagatggcagcagggcaacgtgttcagctgcagcgtgctgcatgaagccctgcacagccactacacccagaagtccctgtctctgagccccggcaagtgataa

SEQ ID NO: 410 - RNA, 1611 nt, synthetic construct
  source 1..1611: mol_type = other RNA
atggattggatttggagaatcctgttcctcgtgggcgccgctaccggagcccactccgaagtggtgctgacacagagccccgccatcctgagtgttagccctggcgatagagtgatcctgagctgcagagcctctcagggcctcgattcttctcacctggcctggtacagattcaagcggggacagatccccacactggtcatcttcggcaccagcaacagagccagaggcacccctgatagattttccggctctggcagcggagccgacttcaccctgacaatcagcagagtggaacccgaggacttcgccacctactactgccagagatacggcggcacccctatcacatttggcggcggaaccacactggacaagaaaggcggcggaggaagcggaggcggaggttctggtggtggtggctctggtggcggaggctcaggcggtggcggatctcaaggcagactgtttcagtctggcgccgaagtgaaaagaccaggcgcctctgtgcggatcagctgtagagccgacgacgacccctacaccgacgatgacaccttcaccaagtactggacccactggatcagacaggcccctggacaaagacctgagtggctgggagtgatcagccctcacttcgccagacctatctacagctacaagttccgggacagactgaccctgaccagagacagctctctgaccgccgtgtacctggaactgaagggcctgcagcctgacgacagcggcatctacttttgcgccagagatcccttcggcgacagggctccccactacaactaccacatggatgtgtggggaggcggcacagccgtgattgtgtcttccggcggcggaggaagcggaggcggaggttctggtggcggaggctcaggcggtggcggatctgaacctaagagcagcgacaagacccacacctgtcctccatgtcctgctccagaactgctggccggaccttccgtgttcctgtttcctccaaagcctaaggacaccctgatgatcagcagaacccctgaagtgacctgcgtggtggtggatgtgtctcacgaggaccctgaagtgaagttcaattggtacgtggacggcgtggaagtgcacaacgccaagaccaagcctagagaggaacagtacaacagcacctacagagtggtgtccgtgctgaccgtgctgcaccaggattggctgaacggcaaagagtacaagtgcaaggtgtccaacaaggccctgcctgcccctatcgaaaagaccatcagcaaggccaagggccagcctcgcgaacctcaagtctgtacactgcctcctagccgcgaggaaatgaccaagaaccaggtgtccctgagctgcgccgtgaagggcttttacccttccgatatcgccgtggaatgggagagcaatggccagcctgagaacaactacaagacaacccctcctgtgctggacagcgacggctcattcttcctggtgtccaagctgacagtggacaagagcagatggcagcagggcaacgtgttcagctgcagcgtgctgcatgaagccctgcacagccactacacccagaagtccctgtctctgagccccggcaagtgataa

SEQ ID NO: 411 - RNA, 1611 nt, synthetic construct
  source 1..1611: mol_type = other RNA
atggattggatttggagaatcctgttcctcgtgggcgccgctaccggagcccactccgaagtggtgctgacacagagccccgccatcctgagtgttagccctggcgatagagtgatcctgagctgcagagcctctcagggcctcgattcttctcacctggcctggtacagattcaagcggggacagatccccacactggtcatcttcggcaccagcaacagagccagaggcacccctgatagattttccggctctggcagcggagccgacttcaccctgacaatcagcagagtggaacccgaggacttcgccacctactactgccagagatacggcggcacccctatcacatttggcggcggaaccacactggacaagaaaggcggcggaggaagcggaggcggaggttctggtggtggtggctctggtggcggaggctcaggcggtggcggatctcaaggcagactgtttcagtctggcgccgaagtgaaaagaccaggcgcctctgtgcggatcagctgtagagccgacgacgacccctacaccgacgatgacaccttcaccaagtactggacccactggatcagacaggcccctggacaaagacctgagtggctgggagtgatcagccctcacttcgccagacctatctacagctacaagttccgggacagactgaccctgaccagagacagctctctgaccgccgtgtacctggaactgaagggcctgcagcctgacgacagcggcatctacttttgcgccagagatcccttcggcgacagggctccccactacaactaccacatggatgtgtggggaggcggcacagccgtgattgtgtcttccggcggcggaggaagcggaggcggaggttctggtggcggaggctcaggcggtggcggatctgaacctaagagcagcgacaagacccacacctgtcctccatgtcctgctccagaactgctgggcggaccttccgtgttcctgtttcctccaaagcctaaggacaccctgatgatcagcagaacccctgaagtgacctgcgtggtggtggatgtgtctcacgaggaccctgaagtgaagttcaattggtacgtggacggcgtggaagtgcacaacgccaagaccaagcctagagaggaacagtacaacagcacctacagagtggtgtccgtgctgaccgtgctgcaccaggattggctgaacggcaaagagtacaagtgcaaggtgtccaacaaggccctgcctgcccctgaggaaaagaccatcagcaaggccaagggccagcctcgcgaacctcaagtctgtacactgcctcctagccgcgaggaaatgaccaagaaccaggtgtccctgagctgcgccgtgaagggcttttacccttccgatatcgccgtggaatgggagagcaatggccagcctgagaacaactacaagacaacccctcctgtgctggacagcgacggctcattcttcctggtgtccaagctgacagtggacaagagcagatggcagcagggcaacgtgttcagctgcagcgtgctgcatgaagccctgcacagccactacacccagaagtccctgtctctgagccccggcaagtgataa

SEQ ID NO: 412 - RNA, 1611 nt, synthetic construct
  source 1..1611: mol_type = other RNA
atggattggatttggagaatcctgttcctcgtgggcgccgctaccggagcccactccgaagtggtgctgacacagagccccgccatcctgagtgttagccctggcgatagagtgatcctgagctgcagagcctctcagggcctcgattcttctcacctggcctggtacagattcaagcggggacagatccccacactggtcatcttcggcaccagcaacagagccagaggcacccctgatagattttccggctctggcagcggagccgacttcaccctgacaatcagcagagtggaacccgaggacttcgccacctactactgccagagatacggcggcacccctatcacatttggcggcggaaccacactggacaagaaaggcggcggaggaagcggaggcggaggttctggtggtggtggctctggtggcggaggctcaggcggtggcggatctcaaggcagactgtttcagtctggcgccgaagtgaaaagaccaggcgcctctgtgcggatcagctgtagagccgacgacgacccctacaccgacgatgacaccttcaccaagtactggacccactggatcagacaggcccctggacaaagacctgagtggctgggagtgatcagccctcacttcgccagacctatctacagctacaagttccgggacagactgaccctgaccagagacagctctctgaccgccgtgtacctggaactgaagggcctgcagcctgacgacagcggcatctacttttgcgccagagatcccttcggcgacagggctccccactacaactaccacatggatgtgtggggaggcggcacagccgtgattgtgtcttccggcggcggaggaagcggaggcggaggttctggtggcggaggctcaggcggtggcggatctgaacctaagagcagcgacaagacccacacctgtcctccatgtcctgctccagaactgctcggcggaccttccgtgttcctgtttcctccaaagcctaaggacaccctgatgatcagcagaacccctgaagtgacctgcgtggtggtggatgtgtctcacgaggacccagaagtgaagttcaattggtacgtggacggcgtggaagtgcacaacgccaagaccaagcctagagaggaacagtacaacagcacctacagagtggtgtccgtgctgacagtgctgcaccaggattggctgaacggcaaagagtacaagtgcaaggtgtccaacaaggccctgcctgctcctatcgagaaaaccatcagcaaggccaagggccagcctagggaaccccaggtttacaccctgcctccatgccgcgaggaaatgaccaagaaccaggtgtccctgtggtgcctggtcaagggcttctacccttccgatatcgccgtggaatgggagagcaatggccagcctgagaacaactacaagacaacccctcctgtgctggacagcgacggctcattcttcctgtacagcaagctgacagtggacaagagcagatggcagcagggcaacgtgttcagctgcagcgtgctgcatgaagccctgcacagccactacacccagaagtccctgtctctgagccccggcaagtgataa

SEQ ID NO: 413 - RNA, 1611 nt, synthetic construct
  source 1..1611: mol_type = other RNA
atggattggatttggagaatcctgttcctcgtgggcgccgctaccggagcccactccgaagtggtgctgacacagagccccgccatcctgagtgttagccctggcgatagagtgatcctgagctgcagagcctctcagggcctcgattcttctcacctggcctggtacagattcaagcggggacagatccccacactggtcatcttcggcaccagcaacagagccagaggcacccctgatagattttccggctctggcagcggagccgacttcaccctgacaatcagcagagtggaacccgaggacttcgccacctactactgccagagatacggcggcacccctatcacatttggcggcggaaccacactggacaagaaaggcggcggaggaagcggaggcggaggttctggtggtggtggctctggtggcggaggctcaggcggtggcggatctcaaggcagactgtttcagtctggcgccgaagtgaaaagaccaggcgcctctgtgcggatcagctgtagagccgacgacgacccctacaccgacgatgacaccttcaccaagtactggacccactggatcagacaggcccctggacaaagacctgagtggctgggagtgatcagccctcacttcgccagacctatctacagctacaagttccgggacagactgaccctgaccagagacagctctctgaccgccgtgtacctggaactgaagggcctgcagcctgacgacagcggcatctacttttgcgccagagatcccttcggcgacagggctccccactacaactaccacatggatgtgtggggaggcggcacagccgtgattgtgtcttccggcggcggaggaagcggaggcggaggttctggtggcggaggctcaggcggtggcggatctgaacctaagagcagcgacaagacccacacctgtcctccatgtcctgctccagaactgctggccggaccttccgtgttcctgtttcctccaaagcctaaggacaccctgatgatcagcagaacccctgaagtgacctgcgtggtggtggatgtgtctcacgaggaccctgaagtgaagttcaattggtacgtggacggcgtggaagtgcacaacgccaagaccaagcctagagaggaacagtacaacagcacctacagagtggtgtccgtgctgaccgtgctgcaccaggattggctgaacggcaaagagtacaagtgcaaggtgtccaacaaggccctgcctctgcctgaggaaaagaccatcagcaaggccaagggccagcctagggaaccccaggtttacaccctgcctccatgccgcgaggaaatgaccaagaaccaggtgtccctgtggtgcctggtcaagggcttctacccttccgatatcgccgtggaatgggagagcaatggccagcctgagaacaactacaagacaacccctcctgtgctggacagcgacggctcattcttcctgtacagcaagctgacagtggacaagagcagatggcagcagggcaacgtgttcagctgcagcgtgctgcatgaagccctgcacagccactacacccagaagtccctgtctctgagccccggcaagtgataa

SEQ ID NO: 414 - RNA, 1611 nt, synthetic construct
  source 1..1611: mol_type = other RNA
atggattggatttggagaatcctgttcctcgtgggcgccgctaccggagcccactccgaagtggtgctgacacagagccccgccatcctgagtgttagccctggcgatagagtgatcctgagctgcagagcctctcagggcctcgattcttctcacctggcctggtacagattcaagcggggacagatccccacactggtcatcttcggcaccagcaacagagccagaggcacccctgatagattttccggctctggcagcggagccgacttcaccctgacaatcagcagagtggaacccgaggacttcgccacctactactgccagagatacggcggcacccctatcacatttggcggcggaaccacactggacaagaaaggcggcggaggaagcggaggcggaggttctggtggtggtggctctggtggcggaggctcaggcggtggcggatctcaaggcagactgtttcagtctggcgccgaagtgaaaagaccaggcgcctctgtgcggatcagctgtagagccgacgacgacccctacaccgacgatgacaccttcaccaagtactggacccactggatcagacaggcccctggacaaagacctgagtggctgggagtgatcagccctcacttcgccagacctatctacagctacaagttccgggacagactgaccctgaccagagacagctctctgaccgccgtgtacctggaactgaagggcctgcagcctgacgacagcggcatctacttttgcgccagagatcccttcggcgacagggctccccactacaactaccacatggatgtgtggggaggcggcacagccgtgattgtgtcttccggcggcggaggaagcggaggcggaggttctggtggcggaggctcaggcggtggcggatctgaacctaagagcagcgacaagacccacacctgtcctccatgtcctgctccagaactgctggccggaccttccgtgttcctgtttcctccaaagcctaaggacaccctgatgatcagcagaacccctgaagtgacctgcgtggtggtggatgtgtctcacgaggaccctgaagtgaagttcaattggtacgtggacggcgtggaagtgcacaacgccaagaccaagcctagagaggaacagtacaacagcacctacagagtggtgtccgtgctgaccgtgctgcaccaggattggctgaacggcaaagagtacaagtgcaaggtgtccaacaaggccctgcctgcccctgaggaaaagaccatcagcaaggccaagggccagcctagggaaccccaggtttacaccctgcctccatgccgcgaggaaatgaccaagaaccaggtgtccctgtggtgcctggtcaagggcttctacccttccgatatcgccgtggaatgggagagcaatggccagcctgagaacaactacaagacaacccctcctgtgctggacagcgacggctcattcttcctgtacagcaagctgacagtggacaagagcagatggcagcagggcaacgtgttcagctgcagcgtgctgcatgaagccctgcacagccactacacccagaagtccctgtctctgagccccggcaagtgataa

SEQ ID NO: 415 - RNA, 1611 nt, synthetic construct
  source 1..1611: mol_type = other RNA
atggattggatttggagaatcctgttcctcgtgggcgccgctaccggagcccactccgaagtggtgctgacacagagccccgccatcctgagtgttagccctggcgatagagtgatcctgagctgcagagcctctcagggcctcgattcttctcacctggcctggtacagattcaagcggggacagatccccacactggtcatcttcggcaccagcaacagagccagaggcacccctgatagattttccggctctggcagcggagccgacttcaccctgacaatcagcagagtggaacccgaggacttcgccacctactactgccagagatacggcggcacccctatcacatttggcggcggaaccacactggacaagaaaggcggcggaggaagcggaggcggaggttctggtggtggtggctctggtggcggaggctcaggcggtggcggatctcaaggcagactgtttcagtctggcgccgaagtgaaaagaccaggcgcctctgtgcggatcagctgtagagccgacgacgacccctacaccgacgatgacaccttcaccaagtactggacccactggatcagacaggcccctggacaaagacctgagtggctgggagtgatcagccctcacttcgccagacctatctacagctacaagttccgggacagactgaccctgaccagagacagctctctgaccgccgtgtacctggaactgaagggcctgcagcctgacgacagcggcatctacttttgcgccagagatcccttcggcgacagggctccccactacaactaccacatggatgtgtggggaggcggcacagccgtgattgtgtcttccggcggcggaggaagcggaggcggaggttctggtggcggaggctcaggcggtggcggatctgaacctaagagcagcgacaagacccacacctgtcctccatgtcctgctccagaactgctggccggaccttccgtgttcctgtttcctccaaagcctaaggacaccctgatgatcagcagaacccctgaagtgacctgcgtggtggtggatgtgtctcacgaggaccctgaagtgaagttcaattggtacgtggacggcgtggaagtgcacaacgccaagaccaagcctagagaggaacagtacaacagcacctacagagtggtgtccgtgctgaccgtgctgcaccaggattggctgaacggcaaagagtacaagtgcaaggtgtccaacaaggccctgcctgcccctatcgaaaagaccatcagcaaggccaagggccagcctagggaaccccaggtttacaccctgcctccatgccgcgaggaaatgaccaagaaccaggtgtccctgtggtgcctggtcaagggcttctacccttccgatatcgccgtggaatgggagagcaatggccagcctgagaacaactacaagacaacccctcctgtgctggacagcgacggctcattcttcctgtacagcaagctgacagtggacaagagcagatggcagcagggcaacgtgttcagctgcagcgtgctgcatgaagccctgcacagccactacacccagaagtccctgtctctgagccccggcaagtgataa

SEQ ID NO: 416 - RNA, 1611 nt, synthetic construct
  source 1..1611: mol_type = other RNA
atggattggatttggagaatcctgttcctcgtgggcgccgctaccggagcccactccgaagtggtgctgacacagagccccgccatcctgagtgttagccctggcgatagagtgatcctgagctgcagagcctctcagggcctcgattcttctcacctggcctggtacagattcaagcggggacagatccccacactggtcatcttcggcaccagcaacagagccagaggcacccctgatagattttccggctctggcagcggagccgacttcaccctgacaatcagcagagtggaacccgaggacttcgccacctactactgccagagatacggcggcacccctatcacatttggcggcggaaccacactggacaagaaaggcggcggaggaagcggaggcggaggttctggtggtggtggctctggtggcggaggctcaggcggtggcggatctcaaggcagactgtttcagtctggcgccgaagtgaaaagaccaggcgcctctgtgcggatcagctgtagagccgacgacgacccctacaccgacgatgacaccttcaccaagtactggacccactggatcagacaggcccctggacaaagacctgagtggctgggagtgatcagccctcacttcgccagacctatctacagctacaagttccgggacagactgaccctgaccagagacagctctctgaccgccgtgtacctggaactgaagggcctgcagcctgacgacagcggcatctacttttgcgccagagatcccttcggcgacagggctccccactacaactaccacatggatgtgtggggaggcggcacagccgtgattgtgtcttccggcggcggaggaagcggaggcggaggttctggtggcggaggctcaggcggtggcggatctgaacctaagagcagcgacaagacccacacctgtcctccatgtcctgctccagaactgctgggcggaccttccgtgttcctgtttcctccaaagcctaaggacaccctgatgatcagcagaacccctgaagtgacctgcgtggtggtggatgtgtctcacgaggaccctgaagtgaagttcaattggtacgtggacggcgtggaagtgcacaacgccaagaccaagcctagagaggaacagtacaacagcacctacagagtggtgtccgtgctgaccgtgctgcaccaggattggctgaacggcaaagagtacaagtgcaaggtgtccaacaaggccctgcctgcccctgaggaaaagaccatcagcaaggccaagggccagcctagggaaccccaggtttacaccctgcctccatgccgcgaggaaatgaccaagaaccaggtgtccctgtggtgcctggtcaagggcttctacccttccgatatcgccgtggaatgggagagcaatggccagcctgagaacaactacaagacaacccctcctgtgctggacagcgacggctcattcttcctgtacagcaagctgacagtggacaagagcagatggcagcagggcaacgtgttcagctgcagcgtgctgcatgaagccctgcacagccactacacccagaagtccctgtctctgagccccggcaagtgataa

SEQ ID NO: 417 - RNA, 1611 nt, synthetic construct; identical to SEQ ID NO: 401
  source 1..1611: mol_type = other RNA

SEQ ID NO: 418 - RNA, 1611 nt, synthetic construct; identical to SEQ ID NO: 402
  source 1..1611: mol_type = other RNA

SEQ ID NO: 419 - RNA, 1611 nt, synthetic construct; identical to SEQ ID NO: 403
  source 1..1611: mol_type = other RNA

SEQ ID NO: 420 - RNA, 1611 nt, synthetic construct; identical to SEQ ID NO: 404
  source 1..1611: mol_type = other RNA

SEQ ID NO: 421 - RNA, 1611 nt, synthetic construct; identical to SEQ ID NO: 405
  source 1..1611: mol_type = other RNA

SEQ ID NO: 422 - RNA, 1611 nt, synthetic construct; identical to SEQ ID NO: 406
  source 1..1611: mol_type = other RNA

SEQ ID NO: 423 - RNA, 1611 nt, synthetic construct; identical to SEQ ID NO: 407
  source 1..1611: mol_type = other RNA

SEQ ID NO: 424 - RNA, 1611 nt, synthetic construct; identical to SEQ ID NO: 408
  source 1..1611: mol_type = other RNA

SEQ ID NO: 425 - RNA, 1611 nt, synthetic construct; identical to SEQ ID NO: 409
  source 1..1611: mol_type = other RNA

SEQ ID NO: 426 - RNA, 1611 nt, synthetic construct; identical to SEQ ID NO: 410
  source 1..1611: mol_type = other RNA

SEQ ID NO: 427 - RNA, 1611 nt, synthetic construct; identical to SEQ ID NO: 411
  source 1..1611: mol_type = other RNA

SEQ ID NO: 428 - RNA, 1611 nt, synthetic construct; identical to SEQ ID NO: 412
  source 1..1611: mol_type = other RNA

SEQ ID NO: 429 - RNA, 1611 nt, synthetic construct; identical to SEQ ID NO: 413
  source 1..1611: mol_type = other RNA

SEQ ID NO: 430 - RNA, 1611 nt, synthetic construct; identical to SEQ ID NO: 414
  source 1..1611: mol_type = other RNA

SEQ ID NO: 431 - RNA, 1611 nt, synthetic construct; identical to SEQ ID NO: 415
  source 1..1611: mol_type = other RNA

SEQ ID NO: 432 - RNA, 1611 nt, synthetic construct; identical to SEQ ID NO: 416
  source 1..1611: mol_type = other RNA

SEQ ID NO: 433 - RNA, 1611 nt, synthetic construct
  source 1..1611: mol_type = other RNA
atggattggatttggagaatcctgttcctcgtgggcgccgctaccggagcccactccgaagtggtgctgacacagagccccgccatcctgagtgttagccctggcgatagagtgatcctgagctgcagagcctctcagggcctcgattcttctcacctggcctggtacagattcaagcggggacagatccccacactggtcatcttcggcaccagcaacagagccagaggcacccctgatagattttccggctctggcagcggagccgacttcaccctgacaatcagcagagtggaacccgaggacttcgccacctactactgccagagatacggcggcacccctatcacatttggcggcggaaccacactggacaagaaaggcggcggaggaagcggaggcggaggttctggtggtggtggctctggtggcggaggctcaggcggtggcggatctcaaggcagactgtttcagtctggcgccgaagtgaaaagaccaggcgcctctgtgcggatcagctgtagagccgacgacgacccctacaccgacgatgacaccttcaccaagtactggacccactggatcagacaggcccctggacaaagacctgagtggctgggagtgatcagccctcacttcgccagacctatctacagctacaagttccgggacagactgaccctgaccagagacagctctctgaccgccgtgtacctggaactgaagggcctgcagcctgacgacagcggcatctacttttgcgccagagatcccttcggcgacagggctccccactacaactaccacatggatgtgtggggaggcggcacagccgtgattgtgtcttccggcggcggaggaagcggaggcggaggttctggtggcggaggctcaggcggtggcggatctgaacctaagagcagcgacaagacccacacctgtcctccatgtcctgctccagaactgctcggcggaccttccgtgttcctgtttcctccaaagcctaaggacaccctgatgatcagcagaacccctgaagtgacctgcgtggtggtggatgtgtctcacgaggacccagaagtgaagttcaattggtacgtggacggcgtggaagtgcacaacgccaagaccaagcctagagaggaacagtacaacagcacctacagagtggtgtccgtgctgacagtgctgcaccaggattggctgaacggcaaagagtacaagtgcaaggtgtccaacaaggccctgcctgctcctatcgagaaaaccatcagcaaggccaagggccagcctagggaaccccaggtttacacactgcctccaagccgcgacgaactgaccaagaaccaggtgtccctgacctgcctcgtgaagggcttctacccttccgatatcgccgtggaatgggagagcaatggccagcctgagaacaactacaagacaacccctcctgtgctggacagcgacggctcattcttcctgtacagcaagctgactgtggataagtcccggtggcagcagggcaacgtgttcagctgttctgtgatgcacgaagccctgcacaaccactacacccagaaaagcctgtctctgagccccggcaagtgataa

SEQ ID NO: 434 - RNA, 1611 nt, synthetic construct
  source 1..1611: mol_type = other RNA
atggattggatttggagaatcctgttcctcgtgggcgccgctaccggagcccactccgaagtggtgctgacacagagccccgccatcctgagtgttagccctggcgatagagtgatcctgagctgcagagcctctcagggcctcgattcttctcacctggcctggtacagattcaagcggggacagatccccacactggtcatcttcggcaccagcaacagagccagaggcacccctgatagattttccggctctggcagcggagccgacttcaccctgacaatcagcagagtggaacccgaggacttcgccacctactactgccagagatacggcggcacccctatcacatttggcggcggaaccacactggacaagaaaggcggcggaggaagcggaggcggaggttctggtggtggtggctctggtggcggaggctcaggcggtggcggatctcaaggcagactgtttcagtctggcgccgaagtgaaaagaccaggcgcctctgtgcggatcagctgtagagccgacgacgacccctacaccgacgatgacaccttcaccaagtactggacccactggatcagacaggcccctggacaaagacctgagtggctgggagtgatcagccctcacttcgccagacctatctacagctacaagttccgggacagactgaccctgaccagagacagctctctgaccgccgtgtacctggaactgaagggcctgcagcctgacgacagcggcatctacttttgcgccagagatcccttcggcgacagggctccccactacaactaccacatggatgtgtggggaggcggcacagccgtgattgtgtcttccggcggcggaggaagcggaggcggaggttctggtggcggaggctcaggcggtggcggatctgaacctaagagcagcgacaagacccacacctgtcctccatgtcctgctccagaactgctcggcggaccttccgtgttcctgtttcctccaaagcctaaggacaccctgatgatcagcagaacccctgaagtgacctgcgtggtggtggatgtgtctcacgaggacccagaagtgaagttcaattggtacgtggacggcgtggaagtgcacaacgccaagaccaagcctagagaggaacagtacaacagcacctacagagtggtgtccgtgctgacagtgctgcaccaggattggctgaacggcaaagagtacaagtgcaaggtgtccaacaaggccctgcctgctcctatcgagaaaaccatcagcaaggccaagggccagcctagggaaccccaggtttacacactgcctccaagccgcgacgaactgaccaagaaccaggtgtccctgacctgcctcgtgaagggcttctacccttccgatatcgccgtggaatgggagagcaatggccagcctgagaacaactacaagacaacccctcctgtgctggacagcgacggctcattcttcctgtacagcaagctgaccgtggacaagtccagatggcagcagggcaacgtgttcagctgtagcgtgctgcacgaagccctgcacagccactacacccagaaaagcctgtctctgagccccggcaaatgataa

SEQ ID NO: 435 - RNA, 1611 nt, synthetic construct
  source 1..1611: mol_type = other RNA
atggattggatttggagaatcctgttcctcgtgggcgccgctaccggagcccactccgaagtggtgctgacacagagccccgccatcctgagtgttagccctggcgatagagtgatcctgagctgcagagcctctcagggcctcgattcttctcacctggcctggtacagattcaagcggggacagatccccacactggtcatcttcggcaccagcaacagagccagaggcacccctgatagattttccggctctggcagcggagccgacttcaccctgacaatcagcagagtggaacccgaggacttcgccacctactactgccagagatacggcggcacccctatcacatttggcggcggaaccacactggacaagaaaggcggcggaggaagcggaggcggaggttctggtggtggtggctctggtggcggaggctcaggcggtggcggatctcaaggcagactgtttcagtctggcgccgaagtgaaaagaccaggcgcctctgtgcggatcagctgtagagccgacgacgacccctacaccgacgatgacaccttcaccaagtactggacccactggatcagacaggcccctggacaaagacctgagtggctgggagtgatcagccctcacttcgccagacctatctacagctacaagttccgggacagactgaccctgaccagagacagctctctgaccgccgtgtacctggaactgaagggcctgcagcctgacgacagcggcatctacttttgcgccagagatcccttcggcgacagggctccccactacaactaccacatggatgtgtggggaggcggcacagccgtgattgtgtcttccggcggcggaggaagcggaggcggaggttctggtggcggaggctcaggcggtggcggatctgaacctaagagcagcgacaagacccacacctgtcctccatgtcctgctccagaactgctggccggaccttccgtgttcctgtttcctccaaagcctaaggacaccctgatgatcagcagaacccctgaagtgacctgcgtggtggtggatgtgtctcacgaggaccctgaagtgaagttcaattggtacgtggacggcgtggaagtgcacaacgccaagaccaagcctagagaggaacagtacaacagcacctacagagtggtgtccgtgctgaccgtgctgcaccaggattggctgaacggcaaagagtacaagtgcaaggtgtccaacaaggccctgcctctgcctgaggaaaagaccatcagcaaggccaagggccagcctagggaaccccaggtttacacactgcctccaagccgcgacgaactgaccaagaaccaggtgtccctgacctgcctcgtgaagggcttctacccttccgatatcgccgtggaatgggagagcaatggccagcctgagaacaactacaagacaacccctcctgtgctggacagcgacggctcattcttcctgtacagcaagctgaccgtggacaagtccagatggcagcagggcaacgtgttcagctgtagcgtgctgcacgaagccctgcacagccactacacccagaaaagcctgtctctgagccccggcaaatgataa

SEQ ID NO: 436 - RNA, 1611 nt, synthetic construct
  source 1..1611: mol_type = other RNA
atggattggatttggagaatcctgttcctcgtgggcgccgctaccggagcccactccgaagtggtgctgacacagagccccgccatcctgagtgttagccctggcgatagagtgatcctgagctgcagagcctctcagggcctcgattcttctcacctggcctggtacagattcaagcggggacagatccccacactggtcatcttcggcaccagcaacagagccagaggcacccctgatagattttccggctctggcagcggagccgacttcaccctgacaatcagcagagtggaacccgaggacttcgccacctactactgccagagatacggcggcacccctatcacatttggcggcggaaccacactggacaagaaaggcggcggaggaagcggaggcggaggttctggtggtggtggctctggtggcggaggctcaggcggtggcggatctcaaggcagactgtttcagtctggcgccgaagtgaaaagaccaggcgcctctgtgcggatcagctgtagagccgacgacgacccctacaccgacgatgacaccttcaccaagtactggacccactggatcagacaggcccctggacaaagacctgagtggctgggagtgatcagccctcacttcgccagacctatctacagctacaagttccgggacagactgaccctgaccagagacagctctctgaccgccgtgtacctggaactgaagggcctgcagcctgacgacagcggcatctacttttgcgccagagatcccttcggcgacagggctccccactacaactaccacatggatgtgtggggaggcggcacagccgtgattgtgtcttccggcggcggaggaagcggaggcggaggttctggtggcggaggctcaggcggtggcggatctgaacctaagagcagcgacaagacccacacctgtcctccatgtcctgctccagaactgctggccggaccttccgtgttcctgtttcctccaaagcctaaggacaccctgatgatcagcagaacccctgaagtgacctgcgtggtggtggatgtgtctcacgaggaccctgaagtgaagttcaattggtacgtggacggcgtggaagtgcacaacgccaagaccaagcctagagaggaacagtacaacagcacctacagagtggtgtccgtgctgaccgtgctgcaccaggattggctgaacggcaaagagtacaagtgcaaggtgtccaacaaggccctgcctgcccctgaggaaaagaccatcagcaaggccaagggccagcctagggaaccccaggtttacacactgcctccaagccgcgacgaactgaccaagaaccaggtgtccctgacctgcctcgtgaagggcttctacccttccgatatcgccgtggaatgggagagcaatggccagcctgagaacaactacaagacaacccctcctgtgctggacagcgacggctcattcttcctgtacagcaagctgaccgtggacaagtccagatggcagcagggcaacgtgttcagctgtagcgtgctgcacgaagccctgcacagccactacacccagaaaagcctgtctctgagccccggcaaatgataa

SEQ ID NO: 437 - RNA, 1611 nt, synthetic construct
  source 1..1611: mol_type = other RNA
atggattggatttggagaatcctgttcctcgtgggcgccgctaccggagcccactccgaagtggtgctgacacagagccccgccatcctgagtgttagccctggcgatagagtgatcctgagctgcagagcctctcagggcctcgattcttctcacctggcctggtacagattcaagcggggacagatccccacactggtcatcttcggcaccagcaacagagccagaggcacccctgatagattttccggctctggcagcggagccgacttcaccctgacaatcagcagagtggaacccgaggacttcgccacctactactgccagagatacggcggcacccctatcacatttggcggcggaaccacactggacaagaaaggcggcggaggaagcggaggcggaggttctggtggtggtggctctggtggcggaggctcaggcggtggcggatctcaaggcagactgtttcagtctggcgccgaagtgaaaagaccaggcgcctctgtgcggatcagctgtagagccgacgacgacccctacaccgacgatgacaccttcaccaagtactggacccactggatcagacaggcccctggacaaagacctgagtggctgggagtgatcagccctcacttcgccagacctatctacagctacaagttccgggacagactgaccctgaccagagacagctctctgaccgccgtgtacctggaactgaagggcctgcagcctgacgacagcggcatctacttttgcgccagagatcccttcggcgacagggctccccactacaactaccacatggatgtgtggggaggcggcacagccgtgattgtgtcttccggcggcggaggaagcggaggcggaggttctggtggcggaggctcaggcggtggcggatctgaacctaagagcagcgacaagacccacacctgtcctccatgtcctgctccagaactgctggccggaccttccgtgttcctgtttcctccaaagcctaaggacaccctgatgatcagcagaacccctgaagtgacctgcgtggtggtggatgtgtctcacgaggaccctgaagtgaagttcaattggtacgtggacggcgtggaagtgcacaacgccaagaccaagcctagagaggaacagtacaacagcacctacagagtggtgtccgtgctgaccgtgctgcaccaggattggctgaacggcaaagagtacaagtgcaaggtgtccaacaaggccctgcctgcccctatcgaaaagaccatcagcaaggccaagggccagcctagggaaccccaggtttacacactgcctccaagccgcgacgaactgaccaagaaccaggtgtccctgacctgcctcgtgaagggcttctacccttccgatatcgccgtggaatgggagagcaatggccagcctgagaacaactacaagacaacccctcctgtgctggacagcgacggctcattcttcctgtacagcaagctgaccgtggacaagtccagatggcagcagggcaacgtgttcagctgtagcgtgctgcacgaagccctgcacagccactacacccagaaaagcctgtctctgagccccggcaaatgataa

SEQ ID NO: 438 - RNA, 1611 nt, synthetic construct
  source 1..1611: mol_type = other RNA
atggattggatttggagaatcctgttcctcgtgggcgccgctaccggagcccactccgaagtggtgctgacacagagccccgccatcctgagtgttagccctggcgatagagtgatcctgagctgcagagcctctcagggcctcgattcttctcacctggcctggtacagattcaagcggggacagatccccacactggtcatcttcggcaccagcaacagagccagaggcacccctgatagattttccggctctggcagcggagccgacttcaccctgacaatcagcagagtggaacccgaggacttcgccacctactactgccagagatacggcggcacccctatcacatttggcggcggaaccacactggacaagaaaggcggcggaggaagcggaggcggaggttctggtggtggtggctctggtggcggaggctcaggcggtggcggatctcaaggcagactgtttcagtctggcgccgaagtgaaaagaccaggcgcctctgtgcggatcagctgtagagccgacgacgacccctacaccgacgatgacaccttcaccaagtactggacccactggatcagacaggcccctggacaaagacctgagtggctgggagtgatcagccctcacttcgccagacctatctacagctacaagttccgggacagactgaccctgaccagagacagctctctgaccgccgtgtacctggaactgaagggcctgcagcctgacgacagcggcatctacttttgcgccagagatcccttcggcgacagggctccccactacaactaccacatggatgtgtggggaggcggcacagccgtgattgtgtcttccggcggcggaggaagcggaggcggaggttctggtggcggaggctcaggcggtggcggatctgaacctaagagcagcgacaagacccacacctgtcctccatgtcctgctccagaactgctgggcggaccttccgtgttcctgtttcctccaaagcctaaggacaccctgatgatcagcagaacccctgaagtgacctgcgtggtggtggatgtgtctcacgaggaccctgaagtgaagttcaattggtacgtggacggcgtggaagtgcacaacgccaagaccaagcctagagaggaacagtacaacagcacctacagagtggtgtccgtgctgaccgtgctgcaccaggattggctgaacggcaaagagtacaagtgcaaggtgtccaacaaggccctgcctgcccctgaggaaaagaccatcagcaaggccaagggccagcctagggaaccccaggtttacacactgcctccaagccgcgacgaactgaccaagaaccaggtgtccctgacctgcctcgtgaagggcttctacccttccgatatcgccgtggaatgggagagcaatggccagcctgagaacaactacaagacaacccctcctgtgctggacagcgacggctcattcttcctgtacagcaagctgaccgtggacaagtccagatggcagcagggcaacgtgttcagctgtagcgtgctgcacgaagccctgcacagccactacacccagaaaagcctgtctctgagccccggcaaatgataa

SEQ ID NO: 439 - RNA, 1611 nt, synthetic construct
  source 1..1611: mol_type = other RNA
atggattggatttggagaatcctgttcctcgtgggcgccgctaccggagcccactccgaagtggtgctgacacagagccccgccatcctgagtgttagccctggcgatagagtgatcctgagctgcagagcctctcagggcctcgattcttctcacctggcctggtacagattcaagcggggacagatccccacactggtcatcttcggcaccagcaacagagccagaggcacccctgatagattttccggctctggcagcggagccgacttcaccctgacaatcagcagagtggaacccgaggacttcgccacctactactgccagagatacggcggcacccctatcacatttggcggcggaaccacactggacaagaaaggcggcggaggaagcggaggcggaggttctggtggtggtggctctggtggcggaggctcaggcggtggcggatctcaaggcagactgtttcagtctggcgccgaagtgaaaagaccaggcgcctctgtgcggatcagctgtagagccgacgacgacccctacaccgacgatgacaccttcaccaagtactggacccactggatcagacaggcccctggacaaagacctgagtggctgggagtgatcagccctcacttcgccagacctatctacagctacaagttccgggacagactgaccctgaccagagacagctctctgaccgccgtgtacctggaactgaagggcctgcagcctgacgacagcggcatctacttttgcgccagagatcccttcggcgacagggctccccactacaactaccacatggatgtgtggggaggcggcacagccgtgattgtgtcttccggcggcggaggaagcggaggcggaggttctggtggcggaggctcaggcggtggcggatctgaacctaagagcagcgacaagacccacacctgtcctccatgtcctgctccagaactgctcggcggaccttccgtgttcctgtttcctccaaagcctaaggacaccctgatgatcagcagaacccctgaagtgacctgcgtggtggtggatgtgtctcacgaggacccagaagtgaagttcaattggtacgtggacggcgtggaagtgcacaacgccaagaccaagcctagagaggaacagtacaacagcacctacagagtggtgtccgtgctgacagtgctgcaccaggattggctgaacggcaaagagtacaagtgcaaggtgtccaacaaggccctgcctgctcctatcgagaaaaccatcagcaaggccaagggccagcctcgcgaacctcaagtctgtacactgcctcctagccgcgacgaactgaccaagaaccaggtgtccctgagctgcgccgtgaagggcttttacccttccgatatcgccgtggaatgggagagcaatggccagcctgagaacaactacaagacaacccctcctgtgctggacagcgacggctcattcttcctggtgtccaagctgacagtggacaagagcagatggcagcagggcaacgtgttcagctgcagcgtgctgcatgaagccctgcacagccactacacccagaagtccctgtctctgagccccggcaagtgataa

SEQ ID NO: 440 - RNA, 1611 nt, synthetic construct
  source 1..1611: mol_type = other RNA
atggattggatttggagaatcctgttcctcgtgggcgccgctaccggagcccactccgaagtggtgctgacacagagccccgccatcctgagtgttagccctggcgatagagtgatcctgagctgcagagcctctcagggcctcgattcttctcacctggcctggtacagattcaagcggggacagatccccacactggtcatcttcggcaccagcaacagagccagaggcacccctgatagattttccggctctggcagcggagccgacttcaccctgacaatcagcagagtggaacccgaggacttcgccacctactactgccagagatacggcggcacccctatcacatttggcggcggaaccacactggacaagaaaggcggcggaggaagcggaggcggaggttctggtggtggtggctctggtggcggaggctcaggcggtggcggatctcaaggcagactgtttcagtctggcgccgaagtgaaaagaccaggcgcctctgtgcggatcagctgtagagccgacgacgacccctacaccgacgatgacaccttcaccaagtactggacccactggatcagacaggcccctggacaaagacctgagtggctgggagtgatcagccctcacttcgccagacctatctacagctacaagttccgggacagactgaccctgaccagagacagctctctgaccgccgtgtacctggaactgaagggcctgcagcctgacgacagcggcatctacttttgcgccagagatcccttcggcgacagggctccccactacaactaccacatggatgtgtggggaggcggcacagccgtgattgtgtcttccggcggcggaggaagcggaggcggaggttctggtggcggaggctcaggcggtggcggatctgaacctaagagcagcgacaagacccacacctgtcctccatgtcctgctccagaactgctggccggaccttccgtgttcctgtttcctccaaagcctaaggacaccctgatgatcagcagaacccctgaagtgacctgcgtggtggtggatgtgtctcacgaggaccctgaagtgaagttcaattggtacgtggacggcgtggaagtgcacaacgccaagaccaagcctagagaggaacagtacaacagcacctacagagtggtgtccgtgctgaccgtgctgcaccaggattggctgaacggcaaagagtacaagtgcaaggtgtccaacaaggccctgcctctgcctgaggaaaagaccatcagcaaggccaagggccagcctcgcgaacctcaagtctgtacactgcctcctagccgcgacgaactgaccaagaaccaggtgtccctgagctgcgccgtgaagggcttttacccttccgatatcgccgtggaatgggagagcaatggccagcctgagaacaactacaagacaacccctcctgtgctggacagcgacggctcattcttcctggtgtccaagctgacagtggacaagagcagatggcagcagggcaacgtgttcagctgcagcgtgctgcatgaagccctgcacagccactacacccagaagtccctgtctctgagccccggcaagtgataa

SEQ ID NO: 441 - RNA, 1611 nt, synthetic construct
  source 1..1611: mol_type = other RNA
atggattggatttggagaatcctgttcctcgtgggcgccgctaccggagcccactccgaagtggtgctgacacagagccccgccatcctgagtgttagccctggcgatagagtgatcctgagctgcagagcctctcagggcctcgattcttctcacctggcctggtacagattcaagcggggacagatccccacactggtcatcttcggcaccagcaacagagccagaggcacccctgatagattttccggctctggcagcggagccgacttcaccctgacaatcagcagagtggaacccgaggacttcgccacctactactgccagagatacggcggcacccctatcacatttggcggcggaaccacactggacaagaaaggcggcggaggaagcggaggcggaggttctggtggtggtggctctggtggcggaggctcaggcggtggcggatctcaaggcagactgtttcagtctggcgccgaagtgaaaagaccaggcgcctctgtgcggatcagctgtagagccgacgacgacccctacaccgacgatgacaccttcaccaagtactggacccactggatcagacaggcccctggacaaagacctgagtggctgggagtgatcagccctcacttcgccagacctatctacagctacaagttccgggacagactgaccctgaccagagacagctctctgaccgccgtgtacctggaactgaagggcctgcagcctgacgacagcggcatctacttttgcgccagagatcccttcggcgacagggctccccactacaactaccacatggatgtgtggggaggcggcacagccgtgattgtgtcttccggcggcggaggaagcggaggcggaggttctggtggcggaggctcaggcggtggcggatctgaacctaagagcagcgacaagacccacacctgtcctccatgtcctgctccagaactgctggccggaccttccgtgttcctgtttcctccaaagcctaaggacaccctgatgatcagcagaacccctgaagtgacctgcgtggtggtggatgtgtctcacgaggaccctgaagtgaagttcaattggtacgtggacggcgtggaagtgcacaacgccaagaccaagcctagagaggaacagtacaacagcacctacagagtggtgtccgtgctgaccgtgctgcaccaggattggctgaacggcaaagagtacaagtgcaaggtgtccaacaaggccctgcctgcccctgaggaaaagaccatcagcaaggccaagggccagcctcgcgaacctcaagtctgtacactgcctcctagccgcgacgaactgaccaagaaccaggtgtccctgagctgcgccgtgaagggcttttacccttccgatatcgccgtggaatgggagagcaatggccagcctgagaacaactacaagacaacccctcctgtgctggacagcgacggctcattcttcctggtgtccaagctgacagtggacaagagcagatggcagcagggcaacgtgttcagctgcagcgtgctgcatgaagccctgcacagccactacacccagaagtccctgtctctgagccccggcaagtgataa

SEQ ID NO: 442 - RNA, 1611 nt, synthetic construct
  source 1..1611: mol_type = other RNA
atggattggatttggagaatcctgttcctcgtgggcgccgctaccggagcccactccgaagtggtgctgacacagagccccgccatcctgagtgttagccctggcgatagagtgatcctgagctgcagagcctctcagggcctcgattcttctcacctggcctggtacagattcaagcggggacagatccccacactggtcatcttcggcaccagcaacagagccagaggcacccctgatagattttccggctctggcagcggagccgacttcaccctgacaatcagcagagtggaacccgaggacttcgccacctactactgccagagatacggcggcacccctatcacatttggcggcggaaccacactggacaagaaaggcggcggaggaagcggaggcggaggttctggtggtggtggctctggtggcggaggctcaggcggtggcggatctcaaggcagactgtttcagtctggcgccgaagtgaaaagaccaggcgcctctgtgcggatcagctgtagagccgacgacgacccctacaccgacgatgacaccttcaccaagtactggacccactggatcagacaggcccctggacaaagacctgagtggctgggagtgatcagccctcacttcgccagacctatctacagctacaagttccgggacagactgaccctgaccagagacagctctctgaccgccgtgtacctggaactgaagggcctgcagcctgacgacagcggcatctacttttgcgccagagatcccttcggcgacagggctccccactacaactaccacatggatgtgtggggaggcggcacagccgtgattgtgtcttccggcggcggaggaagcggaggcggaggttctggtggcggaggctcaggcggtggcggatctgaacctaagagcagcgacaagacccacacctgtcctccatgtcctgctccagaactgctggccggaccttccgtgttcctgtttcctccaaagcctaaggacaccctgatgatcagcagaacccctgaagtgacctgcgtggtggtggatgtgtctcacgaggaccctgaagtgaagttcaattggtacgtggacggcgtggaagtgcacaacgccaagaccaagcctagagaggaacagtacaacagcacctacagagtggtgtccgtgctgaccgtgctgcaccaggattggctgaacggcaaagagtacaagtgcaaggtgtccaacaaggccctgcctgcccctatcgaaaagaccatcagcaaggccaagggccagcctcgcgaacctcaagtctgtacactgcctcctagccgcgacgaactgaccaagaaccaggtgtccctgagctgcgccgtgaagggcttttacccttccgatatcgccgtggaatgggagagcaatggccagcctgagaacaactacaagacaacccctcctgtgctggacagcgacggctcattcttcctggtgtccaagctgacagtggacaagagcagatggcagcagggcaacgtgttcagctgcagcgtgctgcatgaagccctgcacagccactacacccagaagtccctgtctctgagccccggcaagtgataa

SEQ ID NO: 443 - RNA, 1611 nt, synthetic construct
  source 1..1611: mol_type = other RNA
atggattggatttggagaatcctgttcctcgtgggcgccgctaccggagcccactccgaagtggtgctgacacagagccccgccatcctgagtgttagccctggcgatagagtgatcctgagctgcagagcctctcagggcctcgattcttctcacctggcctggtacagattcaagcggggacagatccccacactggtcatcttcggcaccagcaacagagccagaggcacccctgatagattttccggctctggcagcggagccgacttcaccctgacaatcagcagagtggaacccgaggacttcgccacctactactgccagagatacggcggcacccctatcacatttggcggcggaaccacactggacaagaaaggcggcggaggaagcggaggcggaggttctggtggtggtggctctggtggcggaggctcaggcggtggcggatctcaaggcagactgtttcagtctggcgccgaagtgaaaagaccaggcgcctctgtgcggatcagctgtagagccgacgacgacccctacaccgacgatgacaccttcaccaagtactggacccactggatcagacaggcccctggacaaagacctgagtggctgggagtgatcagccctcacttcgccagacctatctacagctacaagttccgggacagactgaccctgaccagagacagctctctgaccgccgtgtacctggaactgaagggcctgcagcctgacgacagcggcatctacttttgcgccagagatcccttcggcgacagggctccccactacaactaccacatggatgtgtggggaggcggcacagccgtgattgtgtcttccggcggcggaggaagcggaggcggaggttctggtggcggaggctcaggcggtggcggatctgaacctaagagcagcgacaagacccacacctgtcctccatgtcctgctccagaactgctgggcggaccttccgtgttcctgtttcctccaaagcctaaggacaccctgatgatcagcagaacccctgaagtgacctgcgtggtggtggatgtgtctcacgaggaccctgaagtgaagttcaattggtacgtggacggcgtggaagtgcacaacgccaagaccaagcctagagaggaacagtacaacagcacctacagagtggtgtccgtgctgaccgtgctgcaccaggattggctgaacggcaaagagtacaagtgcaaggtgtccaacaaggccctgcctgcccctgaggaaaagaccatcagcaaggccaagggccagcctcgcgaacctcaagtctgtacactgcctcctagccgcgacgaactgaccaagaaccaggtgtccctgagctgcgccgtgaagggcttttacccttccgatatcgccgtggaatgggagagcaatggccagcctgagaacaactacaagacaacccctcctgtgctggacagcgacggctcattcttcctggtgtccaagctgacagtggacaagagcagatggcagcagggcaacgtgttcagctgcagcgtgctgcatgaagccctgcacagccactacacccagaagtccctgtctctgagccccggcaagtgataa

SEQ ID NO: 444 - RNA, 1611 nt, synthetic construct
  source 1..1611: mol_type = other RNA
atggattggatttggagaatcctgttcctcgtgggcgccgctaccggagcccactccgaagtggtgctgacacagagccccgccatcctgagtgttagccctggcgatagagtgatcctgagctgcagagcctctcagggcctcgattcttctcacctggcctggtacagattcaagcggggacagatccccacactggtcatcttcggcaccagcaacagagccagaggcacccctgatagattttccggctctggcagcggagccgacttcaccctgacaatcagcagagtggaacccgaggacttcgccacctactactgccagagatacggcggcacccctatcacatttggcggcggaaccacactggacaagaaaggcggcggaggaagcggaggcggaggttctggtggtggtggctctggtggcggaggctcaggcggtggcggatctcaaggcagactgtttcagtctggcgccgaagtgaaaagaccaggcgcctctgtgcggatcagctgtagagccgacgacgacccctacaccgacgatgacaccttcaccaagtactggacccactggatcagacaggcccctggacaaagacctgagtggctgggagtgatcagccctcacttcgccagacctatctacagctacaagttccgggacagactgaccctgaccagagacagctctctgaccgccgtgtacctggaactgaagggcctgcagcctgacgacagcggcatctacttttgcgccagagatcccttcggcgacagggctccccactacaactaccacatggatgtgtggggaggcggcacagccgtgattgtgtcttccggcggcggaggaagcggaggcggaggttctggtggcggaggctcaggcggtggcggatctgaacctaagagcagcgacaagacccacacctgtcctccatgtcctgctccagaactgctcggcggaccttccgtgttcctgtttcctccaaagcctaaggacaccctgatgatcagcagaacccctgaagtgacctgcgtggtggtggatgtgtctcacgaggacccagaagtgaagttcaattggtacgtggacggcgtggaagtgcacaacgccaagaccaagcctagagaggaacagtacaacagcacctacagagtggtgtccgtgctgacagtgctgcaccaggattggctgaacggcaaagagtacaagtgcaaggtgtccaacaaggccctgcctgctcctatcgagaaaaccatcagcaaggccaagggccagcctagggaaccccaggtttacaccctgcctccatgccgcgacgaactgaccaagaaccaggtgtccctgtggtgcctggtcaagggcttctacccttccgatatcgccgtggaatgggagagcaatggccagcctgagaacaactacaagacaacccctcctgtgctggacagcgacggctcattcttcctgtacagcaagctgacagtggacaagagcagatggcagcagggcaacgtgttcagctgcagcgtgctgcatgaagccctgcacagccactacacccagaagtccctgtctctgagccccggcaagtgataa

SEQ ID NO: 445 - RNA, 1611 nt, synthetic construct
  source 1..1611: mol_type = other RNA
atggattggatttggagaatcctgttcctcgtgggcgccgctaccggagcccactccgaagtggtgctgacacagagccccgccatcctgagtgttagccctggcgatagagtgatcctgagctgcagagcctctcagggcctcgattcttctcacctggcctggtacagattcaagcggggacagatccccacactggtcatcttcggcaccagcaacagagccagaggcacccctgatagattttccggctctggcagcggagccgacttcaccctgacaatcagcagagtggaacccgaggacttcgccacctactactgccagagatacggcggcacccctatcacatttggcggcggaaccacactggacaagaaaggcggcggaggaagcggaggcggaggttctggtggtggtggctctggtggcggaggctcaggcggtggcggatctcaaggcagactgtttcagtctggcgccgaagtgaaaagaccaggcgcctctgtgcggatcagctgtagagccgacgacgacccctacaccgacgatgacaccttcaccaagtactggacccactggatcagacaggcccctggacaaagacctgagtggctgggagtgatcagccctcacttcgccagacctatctacagctacaagttccgggacagactgaccctgaccagagacagctctctgaccgccgtgtacctggaactgaagggcctgcagcctgacgacagcggcatctacttttgcgccagagatcccttcggcgacagggctccccactacaactaccacatggatgtgtggggaggcggcacagccgtgattgtgtcttccggcggcggaggaagcggaggcggaggttctggtggcggaggctcaggcggtggcggatctgaacctaagagcagcgacaagacccacacctgtcctccatgtcctgctccagaactgctggccggaccttccgtgttcctgtttcctccaaagcctaaggacaccctgatgatcagcagaacccctgaagtgacctgcgtggtggtggatgtgtctcacgaggaccctgaagtgaagttcaattggtacgtggacggcgtggaagtgcacaacgccaagaccaagcctagagaggaacagtacaacagcacctacagagtggtgtccgtgctgaccgtgctgcaccaggattggctgaacggcaaagagtacaagtgcaaggtgtccaacaaggccctgcctctgcctgaggaaaagaccatcagcaaggccaagggccagcctagggaaccccaggtttacaccctgcctccatgccgcgacgaactgaccaagaaccaggtgtccctgtggtgcctggtcaagggcttctacccttccgatatcgccgtggaatgggagagcaatggccagcctgagaacaactacaagacaacccctcctgtgctggacagcgacggctcattcttcctgtacagcaagctgacagtggacaagagcagatggcagcagggcaacgtgttcagctgcagcgtgctgcatgaagccctgcacagccactacacccagaagtccctgtctctgagccccggcaagtgataa

SEQ ID NO: 446 - RNA, 1611 nt, synthetic construct
  source 1..1611: mol_type = other RNA
atggattggatttggagaatcctgttcctcgtgggcgccgctaccggagcccactccgaagtggtgctgacacagagccccgccatcctgagtgttagccctggcgatagagtgatcctgagctgcagagcctctcagggcctcgattcttctcacctggcctggtacagattcaagcggggacagatccccacactggtcatcttcggcaccagcaacagagccagaggcacccctgatagattttccggctctggcagcggagccgacttcaccctgacaatcagcagagtggaacccgaggacttcgccacctactactgccagagatacggcggcacccctatcacatttggcggcggaaccacactggacaagaaaggcggcggaggaagcggaggcggaggttctggtggtggtggctctggtggcggaggctcaggcggtggcggatctcaaggcagactgtttcagtctggcgccgaagtgaaaagaccaggcgcctctgtgcggatcagctgtagagccgacgacgacccctacaccgacgatgacaccttcaccaagtactggacccactggatcagacaggcccctggacaaagacctgagtggctgggagtgatcagccctcacttcgccagacctatctacagctacaagttccgggacagactgaccctgaccagagacagctctctgaccgccgtgtacctggaactgaagggcctgcagcctgacgacagcggcatctacttttgcgccagagatcccttcggcgacagggctccccactacaactaccacatggatgtgtggggaggcggcacagccgtgattgtgtcttccggcggcggaggaagcggaggcggaggttctggtggcggaggctcaggcggtggcggatctgaacctaagagcagcgacaagacccacacctgtcctccatgtcctgctccagaactgctggccggaccttccgtgttcctgtttcctccaaagcctaaggacaccctgatgatcagcagaacccctgaagtgacctgcgtggtggtggatgtgtctcacgaggaccctgaagtgaagttcaattggtacgtggacggcgtggaagtgcacaacgccaagaccaagcctagagaggaacagtacaacagcacctacagagtggtgtccgtgctgaccgtgctgcaccaggattggctgaacggcaaagagtacaagtgcaaggtgtccaacaaggccctgcctgcccctgaggaaaagaccatcagcaaggccaagggccagcctagggaaccccaggtttacaccctgcctccatgccgcgacgaactgaccaagaaccaggtgtccctgtggtgcctggtcaagggcttctacccttccgatatcgccgtggaatgggagagcaatggccagcctgagaacaactacaagacaacccctcctgtgctggacagcgacggctcattcttcctgtacagcaagctgacagtggacaagagcagatggcagcagggcaacgtgttcagctgcagcgtgctgcatgaagccctgcacagccactacacccagaagtccctgtctctgagccccggcaagtgataa

SEQ ID NO: 447 - RNA, 1611 nt, synthetic construct
  source 1..1611: mol_type = other RNA
atggattggatttggagaatcctgttcctcgtgggcgccgctaccggagcccactccgaagtggtgctgacacagagccccgccatcctgagtgttagccctggcgatagagtgatcctgagctgcagagcctctcagggcctcgattcttctcacctggcctggtacagattcaagcggggacagatccccacactggtcatcttcggcaccagcaacagagccagaggcacccctgatagattttccggctctggcagcggagccgacttcaccctgacaatcagcagagtggaacccgaggacttcgccacctactactgccagagatacggcggcacccctatcacatttggcggcggaaccacactggacaagaaaggcggcggaggaagcggaggcggaggttctggtggtggtggctctggtggcggaggctcaggcggtggcggatctcaaggcagactgtttcagtctggcgccgaagtgaaaagaccaggcgcctctgtgcggatcagctgtagagccgacgacgacccctacaccgacgatgacaccttcaccaagtactggacccactggatcagacaggcccctggacaaagacctgagtggctgggagtgatcagccctcacttcgccagacctatctacagctacaagttccgggacagactgaccctgaccagagacagctctctgaccgccgtgtacctggaactgaagggcctgcagcctgacgacagcggcatctacttttgcgccagagatcccttcggcgacagggctccccactacaactaccacatggatgtgtggggaggcggcacagccgtgattgtgtcttccggcggcggaggaagcggaggcggaggttctggtggcggaggctcaggcggtggcggatctgaacctaagagcagcgacaagacccacacctgtcctccatgtcctgctccagaactgctggccggaccttccgtgttcctgtttcctccaaagcctaaggacaccctgatgatcagcagaacccctgaagtgacctgcgtggtggtggatgtgtctcacgaggaccctgaagtgaagttcaattggtacgtggacggcgtggaagtgcacaacgccaagaccaagcctagagaggaacagtacaacagcacctacagagtggtgtccgtgctgaccgtgctgcaccaggattggctgaacggcaaagagtacaagtgcaaggtgtccaacaaggccctgcctgcccctatcgaaaagaccatcagcaaggccaagggccagcctagggaaccccaggtttacaccctgcctccatgccgcgacgaactgaccaagaaccaggtgtccctgtggtgcctggtcaagggcttctacccttccgatatcgccgtggaatgggagagcaatggccagcctgagaacaactacaagacaacccctcctgtgctggacagcgacggctcattcttcctgtacagcaagctgacagtggacaagagcagatggcagcagggcaacgtgttcagctgcagcgtgctgcatgaagccctgcacagccactacacccagaagtccctgtctctgagccccggcaagtgataa

SEQ ID NO: 448 - RNA, 1611 nt, synthetic construct
  source 1..1611: mol_type = other RNA
atggattggatttggagaatcctgttcctcgtgggcgccgctaccggagcccactccgaagtggtgctgacacagagccccgccatcctgagtgttagccctggcgatagagtgatcctgagctgcagagcctctcagggcctcgattcttctcacctggcctggtacagattcaagcggggacagatccccacactggtcatcttcggcaccagcaacagagccagaggcacccctgatagattttccggctctggcagcggagccgacttcaccctgacaatcagcagagtggaacccgaggacttcgccacctactactgccagagatacggcggcacccctatcacatttggcggcggaaccacactggacaagaaaggcggcggaggaagcggaggcggaggttctggtggtggtggctctggtggcggaggctcaggcggtggcggatctcaaggcagactgtttcagtctggcgccgaagtgaaaagaccaggcgcctctgtgcggatcagctgtagagccgacgacgacccctacaccgacgatgacaccttcaccaagtactggacccactggatcagacaggcccctggacaaagacctgagtggctgggagtgatcagccctcacttcgccagacctatctacagctacaagttccgggacagactgaccctgaccagagacagctctctgaccgccgtgtacctggaactgaagggcctgcagcctgacgacagcggcatctacttttgcgccagagatcccttcggcgacagggctccccactacaactaccacatggatgtgtggggaggcggcacagccgtgattgtgtcttccggcggcggaggaagcggaggcggaggttctggtggcggaggctcaggcggtggcggatctgaacctaagagcagcgacaagacccacacctgtcctccatgtcctgctccagaactgctgggcggaccttccgtgttcctgtttcctccaaagcctaaggacaccctgatgatcagcagaacccctgaagtgacctgcgtggtggtggatgtgtctcacgaggaccctgaagtgaagttcaattggtacgtggacggcgtggaagtgcacaacgccaagaccaagcctagagaggaacagtacaacagcacctacagagtggtgtccgtgctgaccgtgctgcaccaggattggctgaacggcaaagagtacaagtgcaaggtgtccaacaaggccctgcctgcccctgaggaaaagaccatcagcaaggccaagggccagcctagggaaccccaggtttacaccctgcctccatgccgcgacgaactgaccaagaaccaggtgtccctgtggtgcctggtcaagggcttctacccttccgatatcgccgtggaatgggagagcaatggccagcctgagaacaactacaagacaacccctcctgtgctggacagcgacggctcattcttcctgtacagcaagctgacagtggacaagagcagatggcagcagggcaacgtgttcagctgcagcgtgctgcatgaagccctgcacagccactacacccagaagtccctgtctctgagccccggcaagtgataa

SEQ ID NO: 449 - RNA, 708 nt, synthetic construct
  source 1..708: mol_type = other RNA
atggattggatttggagaatcctgttcctcgtgggcgccgctaccggagcccactccgaagttgtgctgacacagagccccgccatcctgagtgttagccctggcgatagagtgatcctgagctgcagagcctctcagggcctcgattcttctcacctggcctggtacagattcaagcggggacagatccccacactggtcatcttcggcaccagcaacagagccagaggcacccctgatagattttccggctctggcagcggagccgacttcaccctgacaatcagcagagtggaacccgaggacttcgccacctactactgccagagatacggcggcacccctatcacatttggcggcggaaccacactggacaagaaacgtacggtggccgctcctagcgtgttcatctttccacctagcgacgagcagctgaagtctggcacagcctctgtcgtgtgcctgctcaacaacttctaccccagagaagccaaggtgcagtggaaggtggacaacgccctgcagagcggcaatagccaagagagcgtgaccgagcaggacagcaaggactctacctacagcctgagcagcacactgaccctgagcaaggccgactacgagaagcacaaagtgtacgcctgcgaagtgacccaccagggcctttctagccctgtgaccaagagcttcaaccggggcgagtgctgataa

SEQ ID NO: 450 - RNA, 702 nt, synthetic construct
  source 1..702: mol_type = other RNA
atggattggatttggagaatcctgttcctcgtgggcgccgctaccggagcccactccgaagttgtgctgacacagagccccgccatcctgagtgttagccctggcgatagagtgatcctgagctgcagagcctctcagggcctcgattcttctcacctggcctggtacagattcaagcggggacagatccccacactggtcatcttcggcaccagcaacagagccagaggcacccctgatagattttccggctctggcagcggagccgacttcaccctgacaatcagcagagtggaacccgaggacttcgccacctactactgccagagatacggcggcacccctatcacatttggcggcggaaccacactggacaagaaaagcagcgcctctacaaagggccccagcgttttcccactggctcctagcagcaagagcacatctggcggaacagccgctctgggctgtctggtcaaggactactttcccgagcctgtgaccgtgtcctggaattctggcgctctgacatccggcgtgcacacctttccagctgtgctgcaaagcagcggcctgtactctctgagcagcgtggtcacagtgccaagctctagcctgggcacccagacctacatctgcaatgtgaaccacaagcctagcaacacgaaggtcgacaagagagtggaacccaagtcctgctgataa

SEQ ID NO: 451 - RNA, 702 nt, synthetic construct
  source 1..702: mol_type = other RNA
atggattggatttggagaatcctgttcctcgtgggcgccgctaccggagcccactccgaagttgtgctgacacagagccccgccatcctgagtgttagccctggcgatagagtgatcctgagctgcagagcctctcagggcctcgattcttctcacctggcctggtacagattcaagcggggacagatccccacactggtcatcttcggcaccagcaacagagccagaggcacccctgatagattttccggctctggcagcggagccgacttcaccctgacaatcagcagagtggaacccgaggacttcgccacctactactgccagagatacggcggcacccctatcacatttggcggcggaaccacactggacaagaaaagcagcgcctctacaaagggccccagcgttttcccactggctcctagcagcaagagcacatctggcggaacagccgctctgggctgtctggtcaaggactactttcccgagcctgtgaccgtgtcctggaattctggcgctctgacatccggcgtgcacacctttccagctgtgctgcaaagcagcggcctgtactctctgagcagcgtggtcacagtgccaagctctagcctgggcacccagacctacatctgcaatgtgaaccacaagcctagcaacacgaaggtcgacaagaaggtggaacccaagtcctgctgataa

SEQ ID NO: 452 - RNA, 708 nt, synthetic construct
  source 1..708: mol_type = other RNA
atggattggatttggagaatcctgttcctcgtgggcgccgctaccggagcccactccgaagttgtgctgacacagagccccgccatcctgagtgttagccctggcgatagagtgatcctgagctgcagagcctctcagggcctcgattcttctcacctggcctggtacagattcaagcggggacagatccccacactggtcatcttcggcaccagcaacagagccagaggcacccctgatagattttccggctctggcagcggagccgacttcaccctgacaatcagcagagtggaacccgaggacttcgccacctactactgccagagatacggcggcacccctatcacatttggcggcggaaccacactggacaagaaacgtacggtggccgctcctagcgtgttcatctttccacctagcgacaagagactgaagtctggcacagcctctgtcgtgtgcctgctcaacaacttctaccccagagaagccaaggtgcagtggaaggtggacaacgccctgcagagcggcaatagccaagagagcgtgaccgagcaggacagcaaggactctacctacagcctgagcagcacactgaccctgagcaaggccgactacgagaagcacaaagtgtacgcctgcgaagtgacccaccagggcctttctagccctgtgaccaagagcttcaaccggggcgagtgctgataa

SEQ ID NO: 453 - RNA, 708 nt, synthetic construct
  source 1..708: mol_type = other RNA
atggattggatttggagaatcctgttcctcgtgggcgccgctaccggagcccactccgaagttgtgctgacacagagccccgccatcctgagtgttagccctggcgatagagtgatcctgagctgcagagcctctcagggcctcgattcttctcacctggcctggtacagattcaagcggggacagatccccacactggtcatcttcggcaccagcaacagagccagaggcacccctgatagattttccggctctggcagcggagccgacttcaccctgacaatcagcagagtggaacccgaggacttcgccacctactactgccagagatacggcggcacccctatcacatttggcggcggaaccacactggacaagaaacgtacggtggccgctcctagcgtgttcatctttccacctagcgacagaaagctgaagtctggcacagcctctgtcgtgtgcctgctcaacaacttctaccccagagaagccaaggtgcagtggaaggtggacaacgccctgcagagcggcaatagccaagagagcgtgaccgagcaggacagcaaggactctacctacagcctgagcagcacactgaccctgagcaaggccgactacgagaagcacaaagtgtacgcctgcgaagtgacccaccagggcctttctagccctgtgaccaagagcttcaaccggggcgagtgctgataa

SEQ ID NO: 454 - RNA, 1907 nt, synthetic construct
  source 1..1907: mol_type = other RNA
agaataaactagtattcttctggtccccacagactcagagagaacccgccaccatggattggatttggagaatcctgttcctcgtgggcgccgctaccggagcccactcccagggcagactgtttcagtctggcgccgaagtgaaaagaccaggcgcctctgtgcggatcagctgcagagctgacgacgacccctacaccgacgacgataccttcaccaagtactggacccactggatcagacaggcccctggacaaagacctgagtggctgggagtgatcagccctcacttcgccagacctatctacagctacaagttccgggacagactgaccctgaccagagacagctctctgaccgccgtgtacctggaactgaagggcctgcagcctgacgacagcggcatctacttttgcgccagagatcccttcggcgacagagcccctcactacaactaccacatggacgtgtggggcggaggcacagccgtgatagttagcagcgcctctacaaagggccctagcgtgttccctctggctcctagcagcaagtcgacatctggcggaacagccgctctgggctgtctggtcaaggactactttcccgagcctgtgacagtgtcctggaactctggcgctctgacaagcggcgtgcacacatttccagccgtgctgcaaagcagcggcctgtactctctgagcagcgtggtcacagtgccaagctctagcctgggcacccagacctacatctgcaatgtgaaccacaagcctagcaacaccaaggtggacaagagagtggaacccaagagctgcgacaagacccacacctgtcctccatgtcctgctccagaactgctcggcggaccttccgtgttcctgtttcctccaaagcctaaggacaccctgatgatcagcagaacccctgaagtgacctgcgtggtggtggatgtgtctcacgaggacccagaagtgaagttcaattggtacgtggacggcgtggaagtgcacaacgccaagaccaagcctagagaggaacagtacaacagcacctacagagtggtgtccgtgctgacagtgctgcaccaggattggctgaacggcaaagagtacaagtgcaaggtgtccaacaaggccctgcctgctcctatcgagaaaaccatcagcaaggccaagggccagcctagggaaccccaggtttacacactgcctccaagccgcgaggaaatgaccaagaaccaggtgtccctgacctgcctcgtgaagggcttctacccttccgatatcgccgtggaatgggagagcaatggccagcctgagaacaactacaagacaacccctcctgtgctggacagcgacggctcattcttcctgtacagcaagctgactgtggataagtcccggtggcagcagggcaacgtgttcagctgttctgtgatgcacgaagccctgcacaaccactacacccagaaaagcctgtctctgagccccggcaagtgataaggatccgatctggtactgcatgcacgcaatgctagctgcccctttcccgtcctgggtaccccgagtctcccccgacctcgggtcccaggtatgctcccacctccacctgccccactcaccacctctgctagttccagacacctcccaagcacgcagcaatgcagctcaaaacgcttagcctagccacacccccacgggaaacagcagtgattaacctttagcaataaacgaaagtttaactaagctatactaaccccagggttggtcaatttcgtgccagccacaccctcgagctagcaaaaaaaaaaaaaaaaaaaaaaaaaaaaaagcatatgactaaaaaaaaaaaaaaaaaaaaaaaaaaaaaaaaaaaaaaaaaaaaaaaaaaaaaaaaaaaaaaaaaaaaaa

SEQ ID NO: 455 - RNA, 1907 nt, synthetic construct
  source 1..1907: mol_type = other RNA
agaataaactagtattcttctggtccccacagactcagagagaacccgccaccatggattggatttggagaatcctgttcctcgtgggcgccgctaccggagcccactcccagggcagactgtttcagtctggcgccgaagtgaaaagaccaggcgcctctgtgcggatcagctgcagagctgacgacgacccctacaccgacgacgataccttcaccaagtactggacccactggatcagacaggcccctggacaaagacctgagtggctgggagtgatcagccctcacttcgccagacctatctacagctacaagttccgggacagactgaccctgaccagagacagctctctgaccgccgtgtacctggaactgaagggcctgcagcctgacgacagcggcatctacttttgcgccagagatcccttcggcgacagagcccctcactacaactaccacatggacgtgtggggcggaggcacagccgtgatagttagcagcgcctctacaaagggccctagcgtgttccctctggctcctagcagcaagtcgacatctggcggaacagccgctctgggctgtctggtcaaggactactttcccgagcctgtgacagtgtcctggaactctggcgctctgacaagcggcgtgcacacatttccagccgtgctgcaaagcagcggcctgtactctctgagcagcgtggtcacagtgccaagctctagcctgggcacccagacctacatctgcaatgtgaaccacaagcctagcaacaccaaggtggacaagagagtggaacccaagagctgcgacaagacccacacctgtcctccatgtcctgctccagaactgctcggcggaccttccgtgttcctgtttcctccaaagcctaaggacaccctgatgatcagcagaacccctgaagtgacctgcgtggtggtggatgtgtctcacgaggacccagaagtgaagttcaattggtacgtggacggcgtggaagtgcacaacgccaagaccaagcctagagaggaacagtacaacagcacctacagagtggtgtccgtgctgacagtgctgcaccaggattggctgaacggcaaagagtacaagtgcaaggtgtccaacaaggccctgcctgctcctatcgagaaaaccatcagcaaggccaagggccagcctagggaaccccaggtttacacactgcctccaagccgcgaggaaatgaccaagaaccaggtgtccctgacctgcctcgtgaagggcttctacccttccgatatcgccgtggaatgggagagcaatggccagcctgagaacaactacaagacaacccctcctgtgctggacagcgacggctcattcttcctgtacagcaagctgaccgtggacaagtccagatggcagcagggcaacgtgttcagctgtagcgtgctgcacgaagccctgcacagccactacacccagaaaagcctgtctctgagccccggcaaatgataaggatccgatctggtactgcatgcacgcaatgctagctgcccctttcccgtcctgggtaccccgagtctcccccgacctcgggtcccaggtatgctcccacctccacctgccccactcaccacctctgctagttccagacacctcccaagcacgcagcaatgcagctcaaaacgcttagcctagccacacccccacgggaaacagcagtgattaacctttagcaataaacgaaagtttaactaagctatactaaccccagggttggtcaatttcgtgccagccacaccctcgagctagcaaaaaaaaaaaaaaaaaaaaaaaaaaaaaagcatatgactaaaaaaaaaaaaaaaaaaaaaaaaaaaaaaaaaaaaaaaaaaaaaaaaaaaaaaaaaaaaaaaaaaaaaa

SEQ ID NO: 456 - RNA, 1907 nt, synthetic construct
  source 1..1907: mol_type = other RNA
agaataaactagtattcttctggtccccacagactcagagagaacccgccaccatggattggatttggagaatcctgttcctcgtgggcgccgctaccggagcccactcccagggcagactgtttcagtctggcgccgaagtgaaaagaccaggcgcctctgtgcggatcagctgcagagctgacgacgacccctacaccgacgacgataccttcaccaagtactggacccactggatcagacaggcccctggacaaagacctgagtggctgggagtgatcagccctcacttcgccagacctatctacagctacaagttccgggacagactgaccctgaccagagacagctctctgaccgccgtgtacctggaactgaagggcctgcagcctgacgacagcggcatctacttttgcgccagagatcccttcggcgacagagcccctcactacaactaccacatggacgtgtggggcggaggcacagccgtgatagttagcagcgcctctacaaagggccctagcgtgttccctctggctcctagcagcaagtcgacatctggcggaacagccgctctgggctgtctggtcaaggactactttcccgagcctgtgacagtgtcctggaactctggcgctctgacaagcggcgtgcacacatttccagccgtgctgcaaagcagcggcctgtactctctgagcagcgtggtcacagtgccaagctctagcctgggcacccagacctacatctgcaatgtgaaccacaagcctagcaacaccaaggtggacaagagagtggaacccaagagctgcgacaagacccacacctgtcctccatgtcctgctccagaactgctcggcggaccttccgtgttcctgtttcctccaaagcctaaggacaccctgatgatcagcagaacccctgaagtgacctgcgtggtggtggatgtgtctcacgaggacccagaagtgaagttcaattggtacgtggacggcgtggaagtgcacaacgccaagaccaagcctagagaggaacagtacaacagcacctacagagtggtgtccgtgctgacagtgctgcaccaggattggctgaacggcaaagagtacaagtgcaaggtgtccaacaaggccctgcctgctcctatcgagaaaaccatcagcaaggccaagggccagcctagggaaccccaggtttacaccctgcctccatgccgcgaggaaatgaccaagaaccaggtgtccctgtggtgcctggtcaagggcttctacccttccgatatcgccgtggaatgggagagcaatggccagcctgagaacaactacaagacaacccctcctgtgctggacagcgacggctcattcttcctgtacagcaagctgacagtggacaagagcagatggcagcagggcaacgtgttcagctgcagcgtgctgcatgaagccctgcacagccactacacccagaagtccctgtctctgagccccggcaagtgataaggatccgatctggtactgcatgcacgcaatgctagctgcccctttcccgtcctgggtaccccgagtctcccccgacctcgggtcccaggtatgctcccacctccacctgccccactcaccacctctgctagttccagacacctcccaagcacgcagcaatgcagctcaaaacgcttagcctagccacacccccacgggaaacagcagtgattaacctttagcaataaacgaaagtttaactaagctatactaaccccagggttggtcaatttcgtgccagccacaccctcgagctagcaaaaaaaaaaaaaaaaaaaaaaaaaaaaaagcatatgactaaaaaaaaaaaaaaaaaaaaaaaaaaaaaaaaaaaaaaaaaaaaaaaaaaaaaaaaaaaaaaaaaaaaaa

SEQ ID NO: 457 - RNA, 1907 nt, synthetic construct
  source 1..1907: mol_type = other RNA
agaataaactagtattcttctggtccccacagactcagagagaacccgccaccatggattggatttggagaatcctgttcctcgtgggcgccgctaccggagcccactcccagggcagactgtttcagtctggcgccgaagtgaaaagaccaggcgcctctgtgcggatcagctgcagagctgacgacgacccctacaccgacgacgataccttcaccaagtactggacccactggatcagacaggcccctggacaaagacctgagtggctgggagtgatcagccctcacttcgccagacctatctacagctacaagttccgggacagactgaccctgaccagagacagctctctgaccgccgtgtacctggaactgaagggcctgcagcctgacgacagcggcatctacttttgcgccagagatcccttcggcgacagagcccctcactacaactaccacatggacgtgtggggcggaggcacagccgtgatagttagcagcgcctctacaaagggccctagcgtgttccctctggctcctagcagcaagtcgacatctggcggaacagccgctctgggctgtctggtcaaggactactttcccgagcctgtgacagtgtcctggaactctggcgctctgacaagcggcgtgcacacatttccagccgtgctgcaaagcagcggcctgtactctctgagcagcgtggtcacagtgccaagctctagcctgggcacccagacctacatctgcaatgtgaaccacaagcctagcaacaccaaggtggacaagagagtggaacccaagagctgcgacaagacccacacctgtcctccatgtcctgctccagaactgctggccggaccttccgtgttcctgtttcctccaaagcctaaggacaccctgatgatcagcagaacccctgaagtgacctgcgtggtggtggatgtgtctcacgaggaccctgaagtgaagttcaattggtacgtggacggcgtggaagtgcacaacgccaagaccaagcctagagaggaacagtacaacagcacctacagagtggtgtccgtgctgaccgtgctgcaccaggattggctgaacggcaaagagtacaagtgcaaggtgtccaacaaggccctgcctctgcctgaggaaaagaccatcagcaaggccaagggccagcctagggaaccccaggtttacacactgcctccaagccgcgaggaaatgaccaagaaccaggtgtccctgacctgcctcgtgaagggcttctacccttccgatatcgccgtggaatgggagagcaatggccagcctgagaacaactacaagacaacccctcctgtgctggacagcgacggctcattcttcctgtacagcaagctgaccgtggacaagtccagatggcagcagggcaacgtgttcagctgtagcgtgctgcacgaagccctgcacagccactacacccagaaaagcctgtctctgagccccggcaaatgataaggatccgatctggtactgcatgcacgcaatgctagctgcccctttcccgtcctgggtaccccgagtctcccccgacctcgggtcccaggtatgctcccacctccacctgccccactcaccacctctgctagttccagacacctcccaagcacgcagcaatgcagctcaaaacgcttagcctagccacacccccacgggaaacagcagtgattaacctttagcaataaacgaaagtttaactaagctatactaaccccagggttggtcaatttcgtgccagccacaccctcgagctagcaaaaaaaaaaaaaaaaaaaaaaaaaaaaaagcatatgactaaaaaaaaaaaaaaaaaaaaaaaaaaaaaaaaaaaaaaaaaaaaaaaaaaaaaaaaaaaaaaaaaaaaaa

SEQ ID NO: 458 - RNA, 1169 nt, synthetic construct
  source 1..1169: mol_type = other RNA
agaataaactagtattcttctggtccccacagactcagagagaacccgccaccatggattggatttggagaatcctgttcctcgtgggcgccgctaccggagcccactccgaagttgtgctgacacagagccccgccatcctgagtgttagccctggcgatagagtgatcctgagctgcagagcctctcagggcctcgattcttctcacctggcctggtacagattcaagcggggacagatccccacactggtcatcttcggcaccagcaacagagccagaggcacccctgatagattttccggctctggcagcggagccgacttcaccctgacaatcagcagagtggaacccgaggacttcgccacctactactgccagagatacggcggcacccctatcacatttggcggcggaaccacactggacaagaaacgtacggtggccgctcctagcgtgttcatctttccacctagcgacgagcagctgaagtctggcacagcctctgtcgtgtgcctgctcaacaacttctaccccagagaagccaaggtgcagtggaaggtggacaacgccctgcagagcggcaatagccaagagagcgtgaccgagcaggacagcaaggactctacctacagcctgagcagcacactgaccctgagcaaggccgactacgagaagcacaaagtgtacgcctgcgaagtgacccaccagggcctttctagccctgtgaccaagagcttcaaccggggcgagtgctgataaggatccgatctggtactgcatgcacgcaatgctagctgcccctttcccgtcctgggtaccccgagtctcccccgacctcgggtcccaggtatgctcccacctccacctgccccactcaccacctctgctagttccagacacctcccaagcacgcagcaatgcagctcaaaacgcttagcctagccacacccccacgggaaacagcagtgattaacctttagcaataaacgaaagtttaactaagctatactaaccccagggttggtcaatttcgtgccagccacaccctcgagctagcaaaaaaaaaaaaaaaaaaaaaaaaaaaaaagcatatgactaaaaaaaaaaaaaaaaaaaaaaaaaaaaaaaaaaaaaaaaaaaaaaaaaaaaaaaaaaaaaaaaaaaaaa

SEQ ID NO: 459 - RNA, 1919 nt, synthetic construct
  source 1..1919: mol_type = other RNA
agaataaactagtattcttctggtccccacagactcagagagaacccgccaccatggattggatttggagaatcctgttcctcgtgggcgccgctaccggagcccactcccagggcagactgtttcagtctggcgccgaagtgaaaagaccaggcgcctctgtgcggatcagctgcagagctgacgacgacccctacaccgacgacgataccttcaccaagtactggacccactggatcagacaggcccctggacaaagacctgagtggctgggagtgatcagccctcacttcgccagacctatctacagctacaagttccgggacagactgaccctgaccagagacagctctctgaccgccgtgtacctggaactgaagggcctgcagcctgacgacagcggcatctacttttgcgccagagatcccttcggcgacagagcccctcactacaactaccacatggacgtgtggggcggaggcacagccgtgatagttagcagcgcatctgtggccgctcctagcgtgttcatcttcccacctagcgacgaggaactgaagtctggcacagccagcgtcgtgtgcctgctgaacaacttctaccccagagaagccaaggtgcagtggaaggtggacaacgccctgcagagcggcaatagccaagagagcgtgaccgagcaggacagcaaggactctacctacagcctgagcagcaccctgacactgagcaaggccgactacgagaagcacaaagtgtacgcctgcgaagtgacccaccagggcctttctagccctgtgaccaagagcttcaaccggggcgagtgcgataagacccacacctgtcctccatgtccagctccagaactgctcggcggaccttccgtgttcctgtttcctccaaagcctaaggacaccctgatgatcagcagaacccctgaagtgacctgcgtggtggtggatgtgtctcacgaggacccagaagtgaagttcaattggtacgtggacggcgtggaagtgcacaacgccaagaccaagcctagagaggaacagtacaacagcacctacagagtggtgtccgtgctgacagtgctgcaccaggattggctgaacggcaaagagtacaagtgcaaggtgtccaacaaggccctgcctgctcctatcgagaaaaccatcagcaaggccaagggccagcctagggaaccccaggtttacacactgcctccaagccgcgaggaaatgaccaagaaccaggtgtccctgacctgcctcgtgaagggcttctacccttccgatatcgccgtggaatgggagagcaatggccagcctgagaacaactacaagacaacccctcctgtgctggacagcgacggctcattcttcctgtacagcaagctgaccgtggacaagtccagatggcagcagggcaacgtgttcagctgtagcgtgctgcacgaagccctgcacagccactacacccagaaaagcctgtctctgagccccggcaaatgataaggatccgatctggtactgcatgcacgcaatgctagctgcccctttcccgtcctgggtaccccgagtctcccccgacctcgggtcccaggtatgctcccacctccacctgccccactcaccacctctgctagttccagacacctcccaagcacgcagcaatgcagctcaaaacgcttagcctagccacacccccacgggaaacagcagtgattaacctttagcaataaacgaaagtttaactaagctatactaaccccagggttggtcaatttcgtgccagccacaccctcgagctagcaaaaaaaaaaaaaaaaaaaaaaaaaaaaaagcatatgactaaaaaaaaaaaaaaaaaaaaaaaaaaaaaaaaaaaaaaaaaaaaaaaaaaaaaaaaaaaaaaaaaaaaaa

SEQ ID NO: 460 - RNA, 1163 nt, synthetic construct
  source 1..1163: mol_type = other RNA
agaataaactagtattcttctggtccccacagactcagagagaacccgccaccatggattggatttggagaatcctgttcctcgtgggcgccgctaccggagcccactccgaagttgtgctgacacagagccccgccatcctgagtgttagccctggcgatagagtgatcctgagctgcagagcctctcagggcctcgattcttctcacctggcctggtacagattcaagcggggacagatccccacactggtcatcttcggcaccagcaacagagccagaggcacccctgatagattttccggctctggcagcggagccgacttcaccctgacaatcagcagagtggaacccgaggacttcgccacctactactgccagagatacggcggcacccctatcacatttggcggcggaaccacactggacaagaaaagcagcgcctctacaaagggccccagcgttttcccactggctcctagcagcaagagcacatctggcggaacagccgctctgggctgtctggtcaaggactactttcccgagcctgtgaccgtgtcctggaattctggcgctctgacatccggcgtgcacacctttccagctgtgctgcaaagcagcggcctgtactctctgagcagcgtggtcacagtgccaagctctagcctgggcacccagacctacatctgcaatgtgaaccacaagcctagcaacacgaaggtcgacaagagagtggaacccaagtcctgctgataaggatccgatctggtactgcatgcacgcaatgctagctgcccctttcccgtcctgggtaccccgagtctcccccgacctcgggtcccaggtatgctcccacctccacctgccccactcaccacctctgctagttccagacacctcccaagcacgcagcaatgcagctcaaaacgcttagcctagccacacccccacgggaaacagcagtgattaacctttagcaataaacgaaagtttaactaagctatactaaccccagggttggtcaatttcgtgccagccacaccctcgagctagcaaaaaaaaaaaaaaaaaaaaaaaaaaaaaagcatatgactaaaaaaaaaaaaaaaaaaaaaaaaaaaaaaaaaaaaaaaaaaaaaaaaaaaaaaaaaaaaaaaaaaaaaa

SEQ ID NO: 461 - RNA, 1907 nt, synthetic construct
  source 1..1907: mol_type = other RNA
agaataaactagtattcttctggtccccacagactcagagagaacccgccaccatggattggatttggagaatcctgttcctcgtgggcgccgctaccggagcccactcccagggcagactgtttcagtctggcgccgaagtgaaaagaccaggcgcctctgtgcggatcagctgcagagctgacgacgacccctacaccgacgacgataccttcaccaagtactggacccactggatcagacaggcccctggacaaagacctgagtggctgggagtgatcagccctcacttcgccagacctatctacagctacaagttccgggacagactgaccctgaccagagacagctctctgaccgccgtgtacctggaactgaagggcctgcagcctgacgacagcggcatctacttttgcgccagagatcccttcggcgacagagcccctcactacaactaccacatggacgtgtggggcggaggcacagccgtgatagttagcagcgcttccacaaagggccctagcgtgttccctctggctcctagcagcaagtctacaagcggaggaacagctgccctgggctgcctggtggaagattactttcctgagcctgtgaccgtgtcctggaacagcggtgctctgacttctggcgtgcacacctttccagccgtgctgcaaagcagcggcctgtactctctgagcagcgtggtcacagtgccaagctctagcctgggcacccagacctacatctgcaatgtgaaccacaagcctagcaacaccaaggtggacgacagagtggaacccaagagctgcgacaagacccacacctgtcctccatgtcctgctccagaactgctcggcggaccttccgtgttcctgtttcctccaaagcctaaggacaccctgatgatcagcagaacccctgaagtgacctgcgtggtggtggatgtgtctcacgaggacccagaagtgaagttcaattggtacgtggacggcgtggaagtgcacaacgccaagaccaagcctagagaggaacagtacaacagcacctacagagtggtgtccgtgctgacagtgctgcaccaggattggctgaacggcaaagagtacaagtgcaaggtgtccaacaaggccctgcctgctcctatcgagaaaaccatcagcaaggccaagggccagcctagggaaccccaggtttacacactgcctccaagccgcgaggaaatgaccaagaaccaggtgtccctgacctgcctcgtgaagggcttctacccttccgatatcgccgtggaatgggagagcaatggccagcctgagaacaactacaagacaacccctcctgtgctggacagcgacggctcattcttcctgtacagcaagctgaccgtggacaagtccagatggcagcagggcaacgtgttcagctgtagcgtgctgcacgaagccctgcacagccactacacccagaaaagcctgtctctgagccccggcaaatgataaggatccgatctggtactgcatgcacgcaatgctagctgcccctttcccgtcctgggtaccccgagtctcccccgacctcgggtcccaggtatgctcccacctccacctgccccactcaccacctctgctagttccagacacctcccaagcacgcagcaatgcagctcaaaacgcttagcctagccacacccccacgggaaacagcagtgattaacctttagcaataaacgaaagtttaactaagctatactaaccccagggttggtcaatttcgtgccagccacaccctcgagctagcaaaaaaaaaaaaaaaaaaaaaaaaaaaaaagcatatgactaaaaaaaaaaaaaaaaaaaaaaaaaaaaaaaaaaaaaaaaaaaaaaaaaaaaaaaaaaaaaaaaaaaaaa

SEQ ID NO: 462 - RNA, 1907 nt, synthetic construct
  source 1..1907: mol_type = other RNA
agaataaactagtattcttctggtccccacagactcagagagaacccgccaccatggattggatttggagaatcctgttcctcgtgggcgccgctaccggagcccactcccagggcagactgtttcagtctggcgccgaagtgaaaagaccaggcgcctctgtgcggatcagctgcagagctgacgacgacccctacaccgacgacgataccttcaccaagtactggacccactggatcagacaggcccctggacaaagacctgagtggctgggagtgatcagccctcacttcgccagacctatctacagctacaagttccgggacagactgaccctgaccagagacagctctctgaccgccgtgtacctggaactgaagggcctgcagcctgacgacagcggcatctacttttgcgccagagatcccttcggcgacagagcccctcactacaactaccacatggacgtgtggggcggaggcacagccgtgatagttagcagcgcttccacaaagggccctagcgtgttccctctggctcctagcagcaagtctacaagcggaggaacagctgccctgggctgcctggtggaagattactttcctgagcctgtgaccgtgtcctggaacagcggtgctctgacttctggcgtgcacacctttccagccgtgctgcaaagcagcggcctgtactctctgagcagcgtggtcacagtgccaagctctagcctgggcacccagacctacatctgcaatgtgaaccacaagcctagcaacaccaaggtggacgacagagtggaacccaagagctgcgacaagacccacacctgtcctccatgtcctgctccagaactgctggccggaccttccgtgttcctgtttcctccaaagcctaaggacaccctgatgatcagcagaacccctgaagtgacctgcgtggtggtggatgtgtctcacgaggaccctgaagtgaagttcaattggtacgtggacggcgtggaagtgcacaacgccaagaccaagcctagagaggaacagtacaacagcacctacagagtggtgtccgtgctgaccgtgctgcaccaggattggctgaacggcaaagagtacaagtgcaaggtgtccaacaaggccctgcctctgcctgaggaaaagaccatcagcaaggccaagggccagcctagggaaccccaggtttacacactgcctccaagccgcgaggaaatgaccaagaaccaggtgtccctgacctgcctcgtgaagggcttctacccttccgatatcgccgtggaatgggagagcaatggccagcctgagaacaactacaagacaacccctcctgtgctggacagcgacggctcattcttcctgtacagcaagctgaccgtggacaagtccagatggcagcagggcaacgtgttcagctgtagcgtgctgcacgaagccctgcacagccactacacccagaaaagcctgtctctgagccccggcaaatgataaggatccgatctggtactgcatgcacgcaatgctagctgcccctttcccgtcctgggtaccccgagtctcccccgacctcgggtcccaggtatgctcccacctccacctgccccactcaccacctctgctagttccagacacctcccaagcacgcagcaatgcagctcaaaacgcttagcctagccacacccccacgggaaacagcagtgattaacctttagcaataaacgaaagtttaactaagctatactaaccccagggttggtcaatttcgtgccagccacaccctcgagctagcaaaaaaaaaaaaaaaaaaaaaaaaaaaaaagcatatgactaaaaaaaaaaaaaaaaaaaaaaaaaaaaaaaaaaaaaaaaaaaaaaaaaaaaaaaaaaaaaaaaaaaaaa

SEQ ID NO: 463 - RNA, 1907 nt, synthetic construct
  source 1..1907: mol_type = other RNA
agaataaactagtattcttctggtccccacagactcagagagaacccgccaccatggattggatttggagaatcctgttcctcgtgggcgccgctaccggagcccactcccagggcagactgtttcagtctggcgccgaagtgaaaagaccaggcgcctctgtgcggatcagctgcagagctgacgacgacccctacaccgacgacgataccttcaccaagtactggacccactggatcagacaggcccctggacaaagacctgagtggctgggagtgatcagccctcacttcgccagacctatctacagctacaagttccgggacagactgaccctgaccagagacagctctctgaccgccgtgtacctggaactgaagggcctgcagcctgacgacagcggcatctacttttgcgccagagatcccttcggcgacagagcccctcactacaactaccacatggacgtgtggggcggaggcacagccgtgatagttagcagcgcttccacaaagggccctagcgtgttccctctggctcctagcagcaagtctacaagcggaggaacagctgccctgggctgcctggtggaagattactttcctgagcctgtgaccgtgtcctggaacagcggtgctctgacttctggcgtgcacacctttccagccgtgctgcaaagcagcggcctgtactctctgagcagcgtggtcacagtgccaagctctagcctgggcacccagacctacatctgcaatgtgaaccacaagcctagcaacaccaaggtggacgacagagtggaacccaagagctgcgacaagacccacacctgtcctccatgtcctgctccagaactgctcggcggaccttccgtgttcctgtttcctccaaagcctaaggacaccctgatgatcagcagaacccctgaagtgacctgcgtggtggtggatgtgtctcacgaggacccagaagtgaagttcaattggtacgtggacggcgtggaagtgcacaacgccaagaccaagcctagagaggaacagtacaacagcacctacagagtggtgtccgtgctgacagtgctgcaccaggattggctgaacggcaaagagtacaagtgcaaggtgtccaacaaggccctgcctgctcctatcgagaaaaccatcagcaaggccaagggccagcctcgcgaacctcaagtctgtacactgcctcctagccgcgaggaaatgaccaagaaccaggtgtccctgagctgcgccgtgaagggcttttacccttccgatatcgccgtggaatgggagagcaatggccagcctgagaacaactacaagacaacccctcctgtgctggacagcgacggctcattcttcctggtgtccaagctgacagtggacaagagcagatggcagcagggcaacgtgttcagctgcagcgtgctgcatgaagccctgcacagccactacacccagaagtccctgtctctgagccccggcaagtgataaggatccgatctggtactgcatgcacgcaatgctagctgcccctttcccgtcctgggtaccccgagtctcccccgacctcgggtcccaggtatgctcccacctccacctgccccactcaccacctctgctagttccagacacctcccaagcacgcagcaatgcagctcaaaacgcttagcctagccacacccccacgggaaacagcagtgattaacctttagcaataaacgaaagtttaactaagctatactaaccccagggttggtcaatttcgtgccagccacaccctcgagctagcaaaaaaaaaaaaaaaaaaaaaaaaaaaaaagcatatgactaaaaaaaaaaaaaaaaaaaaaaaaaaaaaaaaaaaaaaaaaaaaaaaaaaaaaaaaaaaaaaaaaaaaaa

SEQ ID NO: 464 - RNA, 1907 nt, synthetic construct
  source 1..1907: mol_type = other RNA
agaataaactagtattcttctggtccccacagactcagagagaacccgccaccatggattggatttggagaatcctgttcctcgtgggcgccgctaccggagcccactcccagggcagactgtttcagtctggcgccgaagtgaaaagaccaggcgcctctgtgcggatcagctgcagagctgacgacgacccctacaccgacgacgataccttcaccaagtactggacccactggatcagacaggcccctggacaaagacctgagtggctgggagtgatcagccctcacttcgccagacctatctacagctacaagttccgggacagactgaccctgaccagagacagctctctgaccgccgtgtacctggaactgaagggcctgcagcctgacgacagcggcatctacttttgcgccagagatcccttcggcgacagagcccctcactacaactaccacatggacgtgtggggcggaggcacagccgtgatagttagcagcgcttccacaaagggccctagcgtgttccctctggctcctagcagcaagtctacaagcggaggaacagctgccctgggctgcctggtggaagattactttcctgagcctgtgaccgtgtcctggaacagcggtgctctgacttctggcgtgcacacctttccagccgtgctgcaaagcagcggcctgtactctctgagcagcgtggtcacagtgccaagctctagcctgggcacccagacctacatctgcaatgtgaaccacaagcctagcaacaccaaggtggacgacagagtggaacccaagagctgcgacaagacccacacctgtcctccatgtcctgctccagaactgctggccggaccttccgtgttcctgtttcctccaaagcctaaggacaccctgatgatcagcagaacccctgaagtgacctgcgtggtggtggatgtgtctcacgaggaccctgaagtgaagttcaattggtacgtggacggcgtggaagtgcacaacgccaagaccaagcctagagaggaacagtacaacagcacctacagagtggtgtccgtgctgaccgtgctgcaccaggattggctgaacggcaaagagtacaagtgcaaggtgtccaacaaggccctgcctctgcctgaggaaaagaccatcagcaaggccaagggccagcctcgcgaacctcaagtctgtacactgcctcctagccgcgaggaaatgaccaagaaccaggtgtccctgagctgcgccgtgaagggcttttacccttccgatatcgccgtggaatgggagagcaatggccagcctgagaacaactacaagacaacccctcctgtgctggacagcgacggctcattcttcctggtgtccaagctgacagtggacaagagcagatggcagcagggcaacgtgttcagctgcagcgtgctgcatgaagccctgcacagccactacacccagaagtccctgtctctgagccccggcaagtgataaggatccgatctggtactgcatgcacgcaatgctagctgcccctttcccgtcctgggtaccccgagtctcccccgacctcgggtcccaggtatgctcccacctccacctgccccactcaccacctctgctagttccagacacctcccaagcacgcagcaatgcagctcaaaacgcttagcctagccacacccccacgggaaacagcagtgattaacctttagcaataaacgaaagtttaactaagctatactaaccccagggttggtcaatttcgtgccagccacaccctcgagctagcaaaaaaaaaaaaaaaaaaaaaaaaaaaaaagcatatgactaaaaaaaaaaaaaaaaaaaaaaaaaaaaaaaaaaaaaaaaaaaaaaaaaaaaaaaaaaaaaaaaaaaaaa

SEQ ID NO: 465 - RNA, 1907 nt, synthetic construct
  source 1..1907: mol_type = other RNA
agaataaactagtattcttctggtccccacagactcagagagaacccgccaccatggattggatttggagaatcctgttcctcgtgggcgccgctaccggagcccactcccagggcagactgtttcagtctggcgccgaagtgaaaagaccaggcgcctctgtgcggatcagctgcagagctgacgacgacccctacaccgacgacgataccttcaccaagtactggacccactggatcagacaggcccctggacaaagacctgagtggctgggagtgatcagccctcacttcgccagacctatctacagctacaagttccgggacagactgaccctgaccagagacagctctctgaccgccgtgtacctggaactgaagggcctgcagcctgacgacagcggcatctacttttgcgccagagatcccttcggcgacagagcccctcactacaactaccacatggacgtgtggggcggaggcacagccgtgatagttagcagcgcttccacaaagggccctagcgtgttccctctggctcctagcagcaagtctacaagcggaggaacagctgccctgggctgcctggtggaagattactttcctgagcctgtgaccgtgtcctggaacagcggtgctctgacttctggcgtgcacacctttccagccgtgctgcaaagcagcggcctgtactctctgagcagcgtggtcacagtgccaagctctagcctgggcacccagacctacatctgcaatgtgaaccacaagcctagcaacaccaaggtggacgacagagtggaacccaagagctgcgacaagacccacacctgtcctccatgtcctgctccagaactgctcggcggaccttccgtgttcctgtttcctccaaagcctaaggacaccctgatgatcagcagaacccctgaagtgacctgcgtggtggtggatgtgtctcacgaggacccagaagtgaagttcaattggtacgtggacggcgtggaagtgcacaacgccaagaccaagcctagagaggaacagtacaacagcacctacagagtggtgtccgtgctgacagtgctgcaccaggattggctgaacggcaaagagtacaagtgcaaggtgtccaacaaggccctgcctgctcctatcgagaaaaccatcagcaaggccaagggccagcctagggaaccccaggtttacaccctgcctccatgccgcgaggaaatgaccaagaaccaggtgtccctgtggtgcctggtcaagggcttctacccttccgatatcgccgtggaatgggagagcaatggccagcctgagaacaactacaagacaacccctcctgtgctggacagcgacggctcattcttcctgtacagcaagctgacagtggacaagagcagatggcagcagggcaacgtgttcagctgcagcgtgctgcatgaagccctgcacagccactacacccagaagtccctgtctctgagccccggcaagtgataaggatccgatctggtactgcatgcacgcaatgctagctgcccctttcccgtcctgggtaccccgagtctcccccgacctcgggtcccaggtatgctcccacctccacctgccccactcaccacctctgctagttccagacacctcccaagcacgcagcaatgcagctcaaaacgcttagcctagccacacccccacgggaaacagcagtgattaacctttagcaataaacgaaagtttaactaagctatactaaccccagggttggtcaatttcgtgccagccacaccctcgagctagcaaaaaaaaaaaaaaaaaaaaaaaaaaaaaagcatatgactaaaaaaaaaaaaaaaaaaaaaaaaaaaaaaaaaaaaaaaaaaaaaaaaaaaaaaaaaaaaaaaaaaaaaa

SEQ ID NO: 466 - RNA, 1907 nt, synthetic construct
  source 1..1907: mol_type = other RNA
agaataaactagtattcttctggtccccacagactcagagagaacccgccaccatggattggatttggagaatcctgttcctcgtgggcgccgctaccggagcccactcccagggcagactgtttcagtctggcgccgaagtgaaaagaccaggcgcctctgtgcggatcagctgcagagctgacgacgacccctacaccgacgacgataccttcaccaagtactggacccactggatcagacaggcccctggacaaagacctgagtggctgggagtgatcagccctcacttcgccagacctatctacagctacaagttccgggacagactgaccctgaccagagacagctctctgaccgccgtgtacctggaactgaagggcctgcagcctgacgacagcggcatctacttttgcgccagagatcccttcggcgacagagcccctcactacaactaccacatggacgtgtggggcggaggcacagccgtgatagttagcagcgcttccacaaagggccctagcgtgttccctctggctcctagcagcaagtctacaagcggaggaacagctgccctgggctgcctggtggaagattactttcctgagcctgtgaccgtgtcctggaacagcggtgctctgacttctggcgtgcacacctttccagccgtgctgcaaagcagcggcctgtactctctgagcagcgtggtcacagtgccaagctctagcctgggcacccagacctacatctgcaatgtgaaccacaagcctagcaacaccaaggtggacgacagagtggaacccaagagctgcgacaagacccacacctgtcctccatgtcctgctccagaactgctggccggaccttccgtgttcctgtttcctccaaagcctaaggacaccctgatgatcagcagaacccctgaagtgacctgcgtggtggtggatgtgtctcacgaggaccctgaagtgaagttcaattggtacgtggacggcgtggaagtgcacaacgccaagaccaagcctagagaggaacagtacaacagcacctacagagtggtgtccgtgctgaccgtgctgcaccaggattggctgaacggcaaagagtacaagtgcaaggtgtccaacaaggccctgcctctgcctgaggaaaagaccatcagcaaggccaagggccagcctagggaaccccaggtttacaccctgcctccatgccgcgaggaaatgaccaagaaccaggtgtccctgtggtgcctggtcaagggcttctacccttccgatatcgccgtggaatgggagagcaatggccagcctgagaacaactacaagacaacccctcctgtgctggacagcgacggctcattcttcctgtacagcaagctgacagtggacaagagcagatggcagcagggcaacgtgttcagctgcagcgtgctgcatgaagccctgcacagccactacacccagaagtccctgtctctgagccccggcaagtgataaggatccgatctggtactgcatgcacgcaatgctagctgcccctttcccgtcctgggtaccccgagtctcccccgacctcgggtcccaggtatgctcccacctccacctgccccactcaccacctctgctagttccagacacctcccaagcacgcagcaatgcagctcaaaacgcttagcctagccacacccccacgggaaacagcagtgattaacctttagcaataaacgaaagtttaactaagctatactaaccccagggttggtcaatttcgtgccagccacaccctcgagctagcaaaaaaaaaaaaaaaaaaaaaaaaaaaaaagcatatgactaaaaaaaaaaaaaaaaaaaaaaaaaaaaaaaaaaaaaaaaaaaaaaaaaaaaaaaaaaaaaaaaaaaaaa

SEQ ID NO: 467 - RNA, 1169 nt, synthetic construct
  source 1..1169: mol_type = other RNA
agaataaactagtattcttctggtccccacagactcagagagaacccgccaccatggattggatttggagaatcctgttcctcgtgggcgccgctaccggagcccactccgaagttgtgctgacacagagccccgccatcctgagtgttagccctggcgatagagtgatcctgagctgcagagcctctcagggcctcgattcttctcacctggcctggtacagattcaagcggggacagatccccacactggtcatcttcggcaccagcaacagagccagaggcacccctgatagattttccggctctggcagcggagccgacttcaccctgacaatcagcagagtggaacccgaggacttcgccacctactactgccagagatacggcggcacccctatcacatttggcggcggaaccacactggacaagaaacgtacggtggccgctcctagcgtgttcatctttccacctagcgacaagagactgaagtctggcacagcctctgtcgtgtgcctgctcaacaacttctaccccagagaagccaaggtgcagtggaaggtggacaacgccctgcagagcggcaatagccaagagagcgtgaccgagcaggacagcaaggactctacctacagcctgagcagcacactgaccctgagcaaggccgactacgagaagcacaaagtgtacgcctgcgaagtgacccaccagggcctttctagccctgtgaccaagagcttcaaccggggcgagtgctgataaggatccgatctggtactgcatgcacgcaatgctagctgcccctttcccgtcctgggtaccccgagtctcccccgacctcgggtcccaggtatgctcccacctccacctgccccactcaccacctctgctagttccagacacctcccaagcacgcagcaatgcagctcaaaacgcttagcctagccacacccccacgggaaacagcagtgattaacctttagcaataaacgaaagtttaactaagctatactaaccccagggttggtcaatttcgtgccagccacaccctcgagctagcaaaaaaaaaaaaaaaaaaaaaaaaaaaaaagcatatgactaaaaaaaaaaaaaaaaaaaaaaaaaaaaaaaaaaaaaaaaaaaaaaaaaaaaaaaaaaaaaaaaaaaaaa

SEQ ID NO: 468 - RNA, 2057 nt, synthetic construct
  source 1..2057: mol_type = other RNA
agaataaactagtattcttctggtccccacagactcagagagaacccgccaccatggattggatttggagaatcctgttcctcgtgggcgccgctaccggagcccactcccaaggcagactgtttcagtctggcgccgaagtgaaaagaccaggcgcctctgtgcggatcagctgcagagctgacgacgacccctacaccgacgacgataccttcaccaagtactggacccactggatcagacaggcccctggacaaagacctgagtggctgggagtgatcagccctcacttcgccagacctatctacagctacaagttccgggacagactgaccctgaccagagacagctctctgaccgccgtgtacctggaactgaagggcctgcagcctgacgacagcggcatctacttttgcgccagagatcccttcggcgacagagcccctcactacaactaccacatggacgtgtggggcggaggcacagccgtgatagtgtcttccggcggaggtggaagtggtggtggcggtagcggaggcggtgggtccggaggtggtggatctgaagttgtgctgacacagagccctgccatcctgagtgtgtccccaggcgatagagtgatcctgtcctgcagagcctctcagggcctcgattcttctcacctggcctggtacagattcaagcggggacagatccccacactggtcatcttcggcaccagcaacagagccagaggcacccctgatagattttccggctctggcagcggagccgacttcaccctgacaatcagcagagtggaacccgaggacttcgccacctactactgccagagatacggcggcacccctatcacatttggcggcggaaccacactggacaagaaaggcggaggtggaagtggtggtggcggtagcggaggcggtgggtccggaggtggtggatctgaacctaagagcagcgacaagacccacacctgtcctccatgtcctgctccagaactgctcggcggaccttccgtgttcctgtttcctccaaagcctaaggacaccctgatgatcagcagaacccctgaagtgacctgcgtggtggtggatgtgtctcacgaggacccagaagtgaagttcaattggtacgtggacggcgtggaagtgcacaacgccaagaccaagcctagagaggaacagtacaacagcacctacagagtggtgtccgtgctgacagtgctgcaccaggattggctgaacggcaaagagtacaagtgcaaggtgtccaacaaggccctgcctgctcctatcgagaaaaccatcagcaaggccaagggccagcctagggaaccccaggtttacacactgcctccaagccgcgaggaaatgaccaagaaccaggtgtccctgacctgcctcgtgaagggcttctacccttccgatatcgccgtggaatgggagagcaatggccagcctgagaacaactacaagacaacccctcctgtgctggacagcgacggctcattcttcctgtacagcaagctgaccgtggacaagtccagatggcagcagggcaacgtgttcagctgtagcgtgctgcacgaagccctgcacagccactacacccagaaaagcctgtctctgagccccggcaaatgataaggatccgatctggtactgcatgcacgcaatgctagctgcccctttcccgtcctgggtaccccgagtctcccccgacctcgggtcccaggtatgctcccacctccacctgccccactcaccacctctgctagttccagacacctcccaagcacgcagcaatgcagctcaaaacgcttagcctagccacacccccacgggaaacagcagtgattaacctttagcaataaacgaaagtttaactaagctatactaaccccagggttggtcaatttcgtgccagccacaccctcgagctagcaaaaaaaaaaaaaaaaaaaaaaaaaaaaaagcatatgactaaaaaaaaaaaaaaaaaaaaaaaaaaaaaaaaaaaaaaaaaaaaaaaaaaaaaaaaaaaaaaaaaaaaaa

SEQ ID NO: 469 - RNA, 2057 nt, synthetic construct
  source 1..2057: mol_type = other RNA
agaataaactagtattcttctggtccccacagactcagagagaacccgccaccatggattggatttggagaatcctgttcctcgtgggcgccgctaccggagcccactccgaagtggtgctgacacagagccccgccatcctgagtgttagccctggcgatagagtgatcctgagctgcagagcctctcagggcctcgattcttctcacctggcctggtacagattcaagcggggacagatccccacactggtcatcttcggcaccagcaacagagccagaggcacccctgatagattttccggctctggcagcggagccgacttcaccctgacaatcagcagagtggaacccgaggacttcgccacctactactgccagagatacggcggcacccctatcacatttggcggcggaaccacactggacaagaaaggcggaggtggaagtggtggtggcggtagcggaggcggtgggtccggaggtggtggatctcaaggcagactgtttcagtctggcgccgaagtgaaaagaccaggcgcctctgtgcggatcagctgtagagccgacgacgacccctacaccgacgatgacaccttcaccaagtactggacccactggatcagacaggcccctggacaaagacctgagtggctgggagtgatcagccctcacttcgccagacctatctacagctacaagttccgggacagactgaccctgaccagagacagctctctgaccgccgtgtacctggaactgaagggcctgcagcctgacgacagcggcatctacttttgcgccagagatcccttcggcgacagggctccccactacaactaccacatggatgtgtggggaggcggcacagccgtgattgtgtcttccggcggcggaggaagcggaggcggaggttctggtggcggaggctcaggcggtggcggatctgaacctaagagcagcgacaagacccacacctgtcctccatgtcctgctccagaactgctcggcggaccttccgtgttcctgtttcctccaaagcctaaggacaccctgatgatcagcagaacccctgaagtgacctgcgtggtggtggatgtgtctcacgaggacccagaagtgaagttcaattggtacgtggacggcgtggaagtgcacaacgccaagaccaagcctagagaggaacagtacaacagcacctacagagtggtgtccgtgctgacagtgctgcaccaggattggctgaacggcaaagagtacaagtgcaaggtgtccaacaaggccctgcctgctcctatcgagaaaaccatcagcaaggccaagggccagcctagggaaccccaggtttacacactgcctccaagccgcgaggaaatgaccaagaaccaggtgtccctgacctgcctcgtgaagggcttctacccttccgatatcgccgtggaatgggagagcaatggccagcctgagaacaactacaagacaacccctcctgtgctggacagcgacggctcattcttcctgtacagcaagctgaccgtggacaagtccagatggcagcagggcaacgtgttcagctgtagcgtgctgcacgaagccctgcacagccactacacccagaaaagcctgtctctgagccccggcaaatgataaggatccgatctggtactgcatgcacgcaatgctagctgcccctttcccgtcctgggtaccccgagtctcccccgacctcgggtcccaggtatgctcccacctccacctgccccactcaccacctctgctagttccagacacctcccaagcacgcagcaatgcagctcaaaacgcttagcctagccacacccccacgggaaacagcagtgattaacctttagcaataaacgaaagtttaactaagctatactaaccccagggttggtcaatttcgtgccagccacaccctcgagctagcaaaaaaaaaaaaaaaaaaaaaaaaaaaaaagcatatgactaaaaaaaaaaaaaaaaaaaaaaaaaaaaaaaaaaaaaaaaaaaaaaaaaaaaaaaaaaaaaaaaaaaaaa

SEQ ID NO: 470 - RNA, 2072 nt, synthetic construct
  source 1..2072: mol_type = other RNA
agaataaactagtattcttctggtccccacagactcagagagaacccgccaccatggattggatttggagaatcctgttcctcgtgggcgccgctaccggagcccactcccaaggcagactgtttcagtctggcgccgaagtgaaaagaccaggcgcctctgtgcggatcagctgcagagctgacgacgacccctacaccgacgacgataccttcaccaagtactggacccactggatcagacaggcccctggacaaagacctgagtggctgggagtgatcagccctcacttcgccagacctatctacagctacaagttccgggacagactgaccctgaccagagacagctctctgaccgccgtgtacctggaactgaagggcctgcagcctgacgacagcggcatctacttttgcgccagagatcccttcggcgacagagcccctcactacaactaccacatggacgtgtggggcggaggcacagccgtgatagtgtcttccggcggcggaggaagcggaggcgggggttctggcggtggtggctctggtggcggaggctcaggcggtggcggatctgaagttgtgctgacacagagccctgccatcctgagtgtgtccccaggcgatagagtgatcctgtcctgcagagcctctcagggcctcgattcttctcacctggcctggtacagattcaagcggggacagatccccacactggtcatcttcggcaccagcaacagagccagaggcacccctgatagattttccggctctggcagcggagccgacttcaccctgacaatcagcagagtggaacccgaggacttcgccacctactactgccagagatacggcggcacccctatcacatttggcggcggaaccacactggacaagaaaggcggaggtggaagtggtggtggcggtagcggaggcggtgggtccggaggtggtggatctgaacctaagagcagcgacaagacccacacctgtcctccatgtcctgctccagaactgctcggcggaccttccgtgttcctgtttcctccaaagcctaaggacaccctgatgatcagcagaacccctgaagtgacctgcgtggtggtggatgtgtctcacgaggacccagaagtgaagttcaattggtacgtggacggcgtggaagtgcacaacgccaagaccaagcctagagaggaacagtacaacagcacctacagagtggtgtccgtgctgacagtgctgcaccaggattggctgaacggcaaagagtacaagtgcaaggtgtccaacaaggccctgcctgctcctatcgagaaaaccatcagcaaggccaagggccagcctagggaaccccaggtttacacactgcctccaagccgcgaggaaatgaccaagaaccaggtgtccctgacctgcctcgtgaagggcttctacccttccgatatcgccgtggaatgggagagcaatggccagcctgagaacaactacaagacaacccctcctgtgctggacagcgacggctcattcttcctgtacagcaagctgaccgtggacaagtccagatggcagcagggcaacgtgttcagctgtagcgtgctgcacgaagccctgcacagccactacacccagaaaagcctgtctctgagccccggcaaatgataaggatccgatctggtactgcatgcacgcaatgctagctgcccctttcccgtcctgggtaccccgagtctcccccgacctcgggtcccaggtatgctcccacctccacctgccccactcaccacctctgctagttccagacacctcccaagcacgcagcaatgcagctcaaaacgcttagcctagccacacccccacgggaaacagcagtgattaacctttagcaataaacgaaagtttaactaagctatactaaccccagggttggtcaatttcgtgccagccacaccctcgagctagcaaaaaaaaaaaaaaaaaaaaaaaaaaaaaagcatatgactaaaaaaaaaaaaaaaaaaaaaaaaaaaaaaaaaaaaaaaaaaaaaaaaaaaaaaaaaaaaaaaaaaaaaa

SEQ ID NO: 471 - RNA, 2072 nt, synthetic construct
  source 1..2072: mol_type = other RNA
agaataaactagtattcttctggtccccacagactcagagagaacccgccaccatggattggatttggagaatcctgttcctcgtgggcgccgctaccggagcccactccgaagtggtgctgacacagagccccgccatcctgagtgttagccctggcgatagagtgatcctgagctgcagagcctctcagggcctcgattcttctcacctggcctggtacagattcaagcggggacagatccccacactggtcatcttcggcaccagcaacagagccagaggcacccctgatagattttccggctctggcagcggagccgacttcaccctgacaatcagcagagtggaacccgaggacttcgccacctactactgccagagatacggcggcacccctatcacatttggcggcggaaccacactggacaagaaaggcggcggaggaagcggaggcggaggttctggtggtggtggctctggtggcggaggctcaggcggtggcggatctcaaggcagactgtttcagtctggcgccgaagtgaaaagaccaggcgcctctgtgcggatcagctgtagagccgacgacgacccctacaccgacgatgacaccttcaccaagtactggacccactggatcagacaggcccctggacaaagacctgagtggctgggagtgatcagccctcacttcgccagacctatctacagctacaagttccgggacagactgaccctgaccagagacagctctctgaccgccgtgtacctggaactgaagggcctgcagcctgacgacagcggcatctacttttgcgccagagatcccttcggcgacagggctccccactacaactaccacatggatgtgtggggaggcggcacagccgtgattgtgtcttccggcggcggaggaagcggaggcggaggttctggtggcggaggctcaggcggtggcggatctgaacctaagagcagcgacaagacccacacctgtcctccatgtcctgctccagaactgctcggcggaccttccgtgttcctgtttcctccaaagcctaaggacaccctgatgatcagcagaacccctgaagtgacctgcgtggtggtggatgtgtctcacgaggacccagaagtgaagttcaattggtacgtggacggcgtggaagtgcacaacgccaagaccaagcctagagaggaacagtacaacagcacctacagagtggtgtccgtgctgacagtgctgcaccaggattggctgaacggcaaagagtacaagtgcaaggtgtccaacaaggccctgcctgctcctatcgagaaaaccatcagcaaggccaagggccagcctagggaaccccaggtttacacactgcctccaagccgcgaggaaatgaccaagaaccaggtgtccctgacctgcctcgtgaagggcttctacccttccgatatcgccgtggaatgggagagcaatggccagcctgagaacaactacaagacaacccctcctgtgctggacagcgacggctcattcttcctgtacagcaagctgaccgtggacaagtccagatggcagcagggcaacgtgttcagctgtagcgtgctgcacgaagccctgcacagccactacacccagaaaagcctgtctctgagccccggcaaatgataaggatccgatctggtactgcatgcacgcaatgctagctgcccctttcccgtcctgggtaccccgagtctcccccgacctcgggtcccaggtatgctcccacctccacctgccccactcaccacctctgctagttccagacacctcccaagcacgcagcaatgcagctcaaaacgcttagcctagccacacccccacgggaaacagcagtgattaacctttagcaataaacgaaagtttaactaagctatactaaccccagggttggtcaatttcgtgccagccacaccctcgagctagcaaaaaaaaaaaaaaaaaaaaaaaaaaaaaagcatatgactaaaaaaaaaaaaaaaaaaaaaaaaaaaaaaaaaaaaaaaaaaaaaaaaaaaaaaaaaaaaaaaaaaaaaa

SEQ ID NO: 472 - DNA, 53 bp, synthetic construct
  source 1..53: mol_type = other DNA
agaataaactagtattcttctggtccccacagactcagagagaacccgccacc

SEQ ID NO: 473 - DNA, 278 bp, synthetic construct
  source 1..278: mol_type = other DNA
ctggtactgcatgcacgcaatgctagctgcccctttcccgtcctgggtaccccgagtctcccccgacctcgggtcccaggtatgctcccacctccacctgccccactcaccacctctgctagttccagacacctcccaagcacgcagcaatgcagctcaaaacgcttagcctagccacacccccacgggaaacagcagtgattaacctttagcaataaacgaaagtttaactaagctatactaaccccagggttggtcaatttcgtgccagccacacc

SEQ ID NO: 474 - DNA, 110 bp, synthetic construct
  source 1..110: mol_type = other DNA
aaaaaaaaaaaaaaaaaaaaaaaaaaaaaagcatatgactaaaaaaaaaaaaaaaaaaaaaaaaaaaaaaaaaaaaaaaaaaaaaaaaaaaaaaaaaaaaaaaaaaaaaa

SEQ ID NO: 475 - skipped

SEQ ID NO: 476 - DNA, 996 bp, synthetic construct
  source 1..996: mol_type = other DNA
gcctctacaaagggccctagcgtgttccctctggctcctagcagcaagtcgacatctggcggaacagccgctctgggctgtctggtcaaggactactttcccgagcctgtgacagtgtcctggaactctggcgctctgacaagcggcgtgcacacatttccagccgtgctgcaaagcagcggcctgtactctctgagcagcgtggtcacagtgccaagctctagcctgggcacccagacctacatctgcaatgtgaaccacaagcctagcaacaccaaggtggacaagcgcgtggaacccaagagctgcgacaagacccacacctgtcctccatgtcctgctccagaactgctcggcggaccttccgtgttcctgtttcctccaaagcctaaggacaccctgatgatcagcagaacccctgaagtgacctgcgtggtggtggatgtgtctcacgaggaccccgaagtgaagttcaattggtacgtggacggcgtggaagtgcacaacgccaagaccaagcctagagaggaacagtacaacagcacctacagagtggtgtccgtgctgacagtgctgcaccaggattggctgaacggcaaagagtacaagtgcaaggtgtccaacaaggccctgcctgctcctatcgagaaaaccatcagcaaggccaagggccagcctagggaaccccaggtttacacactgcctccaagccgcgaggaaatgaccaagaaccaggtgtccctgacctgcctcgtgaagggcttctacccttccgatatcgccgtggaatgggagagcaatggccagcctgagaacaactacaagacaacccctcctgtgctggacagcgacggctcattcttcctgtacagcaagctgactgtggataagtcccggtggcagcagggcaacgtgttcagctgttctgtgatgcacgaagccctgcacaaccactacacccagaaaagcctgtctctgagccccggcaagtgataa

SEQ ID NO: 477 - DNA, 996 bp, synthetic construct
  source 1..996: mol_type = other DNA
gcctccacaaagggccctagcgtgttccctctggctcctagcagcaagtctacaagcggaggaacagctgccctgggctgcctggtcaaggattactttcctgagcctgtgaccgtgtcttggaactctggcgctctgacaagcggcgtgcacacatttccagccgtgctgcaaagcagcggcctgtactctctgagcagcgtggtcacagtgccaagctctagcctgggcacccagacctacatctgcaatgtgaaccacaagcctagcaacaccaaggtggacaagagagtggaacccaagagctgcgacaagacccacacctgtcctccatgtcctgctccagaactgctcggcggaccttccgtgttcctgtttcctccaaagcctaaggacaccctgatgatcagcagaacccctgaagtgacctgcgtggtggtggatgtgtctcacgaggacccagaagtgaagttcaattggtacgtggacggcgtggaagtgcacaacgccaagaccaagcctagagaggaacagtacaacagcacctacagagtggtgtccgtgctgacagtgctgcaccaggattggctgaacggcaaagagtacaagtgcaaggtgtccaacaaggccctgcctgctcctatcgagaaaaccatcagcaaggccaagggccagcctagggaaccccaggtttacacactgcctccaagccgcgaggaaatgaccaagaaccaggtgtccctgacctgcctcgtgaagggcttctacccttccgatatcgccgtggaatgggagagcaatggccagcctgagaacaactacaagacaacccctcctgtgctggacagcgacggctcattcttcctgtacagcaagctgaccgtggacaagtccagatggcagcagggcaacgtgttcagctgtagcgtgctgcacgaagccctgcacagccactacacccagaaaagcctgtctctgagccccggcaaatgataa

SEQ ID NO: 478 - DNA, 996 bp, synthetic construct
  source 1..996: mol_type = other DNA
gcctctacaaagggccccagcgtgttcccactggctcctagcagcaagtctacaagcggaggaacagctgccctgggctgcctggtcaaggattactttcctgagcctgtgaccgtgtcttggaactctggcgctctgacaagcggcgtgcacacatttccagccgtgctgcaaagcagcggcctgtactctctgagcagcgtggtcacagtgccaagctctagcctgggcacccagacctacatctgcaatgtgaaccacaagcctagcaacaccaaggtggacaagagagtggaacccaagagctgcgacaagacccacacctgtcctccatgtcctgctccagaactgctcggcggaccttccgtgttcctgtttcctccaaagcctaaggacaccctgatgatcagcagaacccctgaagtgacctgcgtggtggtggatgtgtctcacgaggacccagaagtgaagttcaattggtacgtggacggcgtggaagtgcacaacgccaagaccaagcctagagaggaacagtacaacagcacctacagagtggtgtccgtgctgacagtgctgcaccaggattggctgaacggcaaagagtacaagtgcaaggtgtccaacaaggccctgcctgctcctatcgagaaaaccatcagcaaggccaagggccagcctagggaaccccaggtttacaccctgcctccatgccgcgaggaaatgaccaagaaccaggtgtccctgtggtgcctcgtgaagggcttctacccttccgatatcgccgtggaatgggagagcaatggccagcctgagaacaactacaagacaacccctcctgtgctggacagcgacggctcattcttcctgtacagcaagctgaccgtggacaagtccagatggcagcagggcaacgtgttcagctgtagcgtgctgcacgaagccctgcacagccactacacccagaaaagcctgtctctgagccccggcaagtgataa

SEQ ID NO: 479 - DNA, 996 bp, synthetic construct
  source 1..996: mol_type = other DNA
gcctccacaaagggccctagcgtgttcccactggctcctagcagcaagtctacaagcggaggaacagccgctctgggctgcctggtcaaggattactttcccgagcctgtgaccgtgtcctggaattctggcgctctgacaagcggcgtgcacacctttccagctgtgctgcaaagcagcggcctgtactctctgagcagcgtggtcacagtgccaagctctagcctgggcacccagacctacatctgcaatgtgaaccacaagcctagcaacaccaaggtggacaagagagtggaacccaagagctgcgacaagacccacacctgtcctccatgtcctgctccagaactgctggccggaccttccgtgttcctgtttcctccaaagcctaaggacaccctgatgatcagcagaacccctgaagtgacctgcgtggtggtggatgtgtctcacgaggaccctgaagtgaagttcaattggtacgtggacggcgtggaagtgcacaacgccaagaccaagcctagagaggaacagtacaacagcacctacagagtggtgtccgtgctgaccgtgctgcaccaggattggctgaacggcaaagagtacaagtgcaaggtgtccaacaaggccctgcctctgcctgaggaaaagaccatcagcaaggccaagggccagcctagggaaccccaggtttacacactgcctccaagccgcgaggaaatgaccaagaaccaggtgtccctgacctgcctcgtgaagggcttctacccttccgatatcgccgtggaatgggagagcaatggccagcctgagaacaactacaagacaacccctcctgtgctggacagcgacggctcattcttcctgtacagcaagctgaccgtggacaagtccagatggcagcagggcaacgtgttcagctgtagcgtgctgcacgaagccctgcacagccactacacccagaaaagcctgtctctgagccccggcaaatgataa

SEQ ID NO: 480 - DNA, 327 bp, synthetic construct; identical to SEQ ID NO: 94
  source 1..327: mol_type = other DNA

SEQ ID NO: 481 - DNA, 399 bp, synthetic construct
  source 1..399: mol_type = other DNA
ctggtactgcatgcacgcaatgctagctgcccctttcccgtcctgggtaccccgagtctcccccgacctcgggtcccaggtatgctcccacctccacctgccccactcaccacctctgctagttccagacacctcccaagcacgcagcaatgcagctcaaaacgcttagcctagccacacccccacgggaaacagcagtgattaacctttagcaataaacgaaagtttaactaagctatactaaccccagggttggtcaatttcgtgccagccacaccctcgagctagcaaaaaaaaaaaaaaaaaaaaaaaaaaaaaagcatatgactaaaaaaaaaaaaaaaaaaaaaaaaaaaaaaaaaaaaaaaaaaaaaaaaaaaaaaaaaaaaaaaaaaaaaa

SEQ ID NO: 482 - DNA, 702 bp, synthetic construct
  source 1..702: mol_type = other DNA
gaacctaagagcagcgacaagacccacacctgtcctccatgtcctgctccagaactgctcggcggaccttccgtgttcctgtttcctccaaagcctaaggacaccctgatgatcagcagaacccctgaagtgacctgcgtggtggtggacgtgtcccacgaagatcccgaagtgaagttcaattggtacgtggacggcgtggaagtgcacaacgccaagaccaagcctagagaggaacagtacaacagcacctacagagtggtgtccgtgctgaccgtgctgcaccaggattggctgaacggcaaagagtacaagtgcaaggtgtccaacaaggccctgcctgctcctatcgagaaaaccatcagcaaggccaagggccagcctagggaaccccaggtttacacactgcctccaagccgggaggagatgaccaagaaccaggtgtccctgacctgcctggtcaagggcttctacccttccgatatcgccgtggaatgggagagcaatggccagcctgagaacaactacaagacaacccctcctgtgctggacagcgacggctcattcttcctgtacagcaagctgacagtggacaagagcagatggcagcagggcaacgtgttcagctgctctgtgctgcacgaagccctgcacagccactacacccagaagtccctgtctctgagccccggcaagtgataa

SEQ ID NO: 483 - DNA, 57 bp, synthetic construct
  source 1..57: mol_type = other DNA
atggattggatctggcgcatcctgtttctcgtgggagctgccacaggcgcccattct

SEQ ID NO: 484 - DNA, 40 bp, synthetic construct
  source 1..40: mol_type = other DNA
attcttctggtccccacagactcagagagaacccgccacc

SEQ ID NO: 485 - DNA, 399 bp, synthetic construct; identical to SEQ ID NO: 481
  source 1..399: mol_type = other DNA

SEQ ID NO: 486 - DNA, 60 bp, synthetic construct
  source 1..60: mol_type = other DNA
ggcggaggtggaagtggtggtggcggtagcggaggcggtgggtccggaggtggtggatct

SEQ ID NO: 487 - DNA, 60 bp, synthetic construct
  source 1..60: mol_type = other DNA
ggcggcggaggaagcggaggcggaggttctggtggcggaggctcaggcggtggcggatct

SEQ ID NO: 488 - DNA, 60 bp, synthetic construct; identical to SEQ ID NO: 486
  source 1..60: mol_type = other DNA

SEQ ID NO: 489 - DNA, 60 bp, synthetic construct; identical to SEQ ID NO: 34
  source 1..60: mol_type = other DNA

SEQ ID NO: 490 - DNA, 60 bp, synthetic construct
  source 1..60: mol_type = other DNA
ggtggtggtggttctggcggaggcggaagtggtggcggtgggtccggaggtggtggatct

SEQ ID NO: 491 - DNA, 75 bp, synthetic construct
  source 1..75: mol_type = other DNA
ggcggcggaggaagcggaggcggaggttctggtggtggtggctctggtggcggaggctcaggcggtggcggatct

SEQ ID NO: 492 - DNA, 75 bp, synthetic construct; identical to SEQ ID NO: 37
  source 1..75: mol_type = other DNA

SEQ ID NO: 493 - DNA, 393 bp, synthetic construct
  source 1..393: mol_type = other DNA
caaggcagactgtttcagtctggcgccgaagtgaaaagaccaggcgcctctgtgcggatcagctgtagagccgacgacgacccctacaccgacgatgacaccttcaccaagtactggacccactggatcagacaggcccctggacaaagacctgagtggctgggagtgatcagccctcacttcgccagacctatctacagctacaagttccgggacagactgaccctgaccagagacagctctctgaccgccgtgtacctggaactgaagggcctgcagcctgacgacagcggcatctacttttgcgccagagatcccttcggcgacagggctccccactacaactaccacatggatgtgtggggaggcggcacagccgtgattgtgtcttcc

SEQ ID NO: 494 - DNA, 393 bp, synthetic construct
  source 1..393: mol_type = other DNA
caaggcagactgtttcagtctggcgccgaagtgaaaagaccaggcgcctctgtgcggatcagctgcagagctgacgacgacccctacaccgacgacgataccttcaccaagtactggacccactggatcagacaggcccctggacaaagacctgagtggctgggagtgatcagccctcacttcgccagacctatctacagctacaagttccgggacagactgaccctgaccagagacagctctctgaccgccgtgtacctggaactgaagggcctgcagcctgacgacagcggcatctacttttgcgccagagatcccttcggcgacagagcccctcactacaactaccacatggacgtgtggggcggaggcacagccgtgatagtgtcttcc

SEQ ID NO: 495 - DNA, 324 bp, synthetic construct
  source 1..324: mol_type = other DNA
gaagtggtgctgacacagagccccgccatcctgagtgttagccctggcgatagagtgatcctgagctgcagagcctctcagggcctcgattcttctcacctggcctggtacagattcaagcggggacagatccccacactggtcatcttcggcaccagcaacagagccagaggcacccctgatagattttccggctctggcagcggagccgacttcaccctgacaatcagcagagtggaacccgaggacttcgccacctactactgccagagatacggcggcacccctatcacatttggcggcggaaccacactggacaagaaa

SEQ ID NO: 496 - DNA, 324 bp, synthetic construct
  source 1..324: mol_type = other DNA
gaagttgtgctgacacagagccctgccatcctgagtgtgtccccaggcgatagagtgatcctgtcctgcagagcctctcagggcctcgattcttctcacctggcctggtacagattcaagcggggacagatccccacactggtcatcttcggcaccagcaacagagccagaggcacccctgatagattttccggctctggcagcggagccgacttcaccctgacaatcagcagagtggaacccgaggacttcgccacctactactgccagagatacggcggcacccctatcacatttggcggcggaaccacactggacaagaaa

SEQ ID NO: 497 - DNA, 687 bp, synthetic construct
  source 1..687: mol_type = other DNA
gataagacccacacctgtcctccatgtccagctccagaactgctcggcggaccttccgtgttcctgtttcctccaaagcctaaggacaccctgatgatcagcagaacccctgaagtgacctgcgtggtggtggatgtgtctcacgaggacccagaagtgaagttcaattggtacgtggacggcgtggaagtgcacaatgccaagaccaagcctagagaggaacagtacaacagcacctacagagtggtgtccgtgctgaccgtgctgcaccaggattggctgaacggcaaagagtacaagtgcaaggtgtccaacaaggccctgcctgctcctatcgagaaaaccatcagcaaggccaagggccagcctagggaaccccaggtttacacactgcctccaagccgcgaggaaatgaccaagaaccaggtgtccctgacctgcctggtcaagggcttctacccttccgatatcgccgtggaatgggagagcaatggccagcctgagaacaactacaagaccacacctcctgtgctggacagcgacggctcattcttcctgtacagcaagctgacagtggacaagagcagatggcagcagggcaacgtgttcagctgctctgtgctgcacgaagccctgcacagccactacacccagaaaagcctgagcctgtctcctggcaagtgataa

SEQ ID NO: 498 - DNA, 321 bp, synthetic construct; identical to SEQ ID NO: 97
  source 1..321: mol_type = other DNA

SEQ ID NO: 499 - DNA, 321 bp, synthetic construct; identical to SEQ ID NO: 46
  source 1..321: mol_type = other DNA

SEQ ID NO: 500 - DNA, 57 bp, synthetic construct
  source 1..57: mol_type = other DNA
atggattggatctggcgcatcctgtttctcgtgggagctgccacaggcgcccacagc

SEQ ID NO: 501 - DNA, 57 bp, synthetic construct
  source 1..57: mol_type = other DNA
atggattggatctggcgcatcctgtttctcgtgggagctgccacaggcgcccactct

SEQ ID NO: 502 - DNA, 399 bp, synthetic construct; identical to SEQ ID NO: 481
  source 1..399: mol_type = other DNA

SEQ ID NO: 503 - DNA, 294 bp, synthetic construct; identical to SEQ ID NO: 52
  source 1..294: mol_type = other DNA

SEQ ID NO: 504 - DNA, 327 bp, synthetic construct; identical to SEQ ID NO: 100
  source 1..327: mol_type = other DNA

SEQ ID NO: 505 - DNA, 702 bp, synthetic construct
  source 1..702: mol_type = other DNA
gaacccaagagctgcgacaagacccacacctgtcctccatgtcctgctccagaactgctcggcggaccttccgtgttcctgtttcctccaaagcctaaggacaccctgatgatcagcagaacccctgaagtgacctgcgtggtggtggatgtgtctcacgaggacccagaagtgaagttcaattggtacgtggacggcgtggaagtgcacaacgccaagaccaagcctagagaggaacagtacaacagcacctacagagtggtgtccgtgctgacagtgctgcaccaggattggctgaacggcaaagagtacaagtgcaaggtgtccaacaaggccctgcctgctcctatcgagaaaaccatcagcaaggccaagggccagcctagggaaccccaggtttacacactgcctccaagccgcgaggaaatgaccaagaaccaggtgtccctgacctgcctggtcaagggcttctacccttccgatatcgccgtggaatgggagagcaatggccagcctgagaacaactacaagacaacccctcctgtgctggacagcgacggctcattcttcctgtacagcaagctgaccgtggacaagagcagatggcagcagggcaacgtgttcagctgtagcgtgctgcacgaagccctgcacagccactacacccagaaaagcctgtctctgagccccggcaagtgataa

SEQ ID NO: 506 - DNA, 702 bp, synthetic construct
  source 1..702: mol_type = other DNA
gaacccaagagctgcgacaagacccacacctgtcctccatgtcctgctccagaactgctcggcggaccttccgtgttcctgtttcctccaaagcctaaggacaccctgatgatcagcagaacccctgaagtgacctgcgtggtggtggatgtgtctcacgaggaccccgaagtgaagttcaattggtacgtggacggcgtggaagtgcacaacgccaagaccaagcctagagaggaacagtacaacagcacctacagagtggtgtccgtgctgaccgtgctgcaccaggattggctgaacggcaaagagtacaagtgcaaggtgtccaacaaggccctgcctgctcctatcgagaaaaccatcagcaaggccaagggccagcctcgcgaacctcaagtctgtacactgcctcctagccgcgaggaaatgaccaagaaccaggtgtccctgagctgcgccgtgaagggcttttacccttccgatatcgccgtggaatgggagagcaatggccagcctgagaacaactacaagacaacccctcctgtgctggacagcgacggctcattcttcctggtgtccaagctgacagtggacaagagcagatggcagcagggcaacgtgttcagctgcagcgtgctgcatgaagccctgcacagccactacacccagaagtccctgtctctgagccccggcaagtgataa

SEQ ID NO: 507 - DNA, 702 bp, synthetic construct
  source 1..702: mol_type = other DNA
gaacccaagagctgcgacaagacccacacctgtcctccatgtcctgctccagaactgctcggcggaccttccgtgttcctgtttcctccaaagcctaaggacaccctgatgatcagcagaacccctgaagtgacctgcgtggtggtggatgtgtctcacgaggaccccgaagtgaagttcaattggtacgtggacggcgtggaagtgcacaacgccaagaccaagcctagagaggaacagtacaacagcacctacagagtggtgtccgtgctgaccgtgctgcaccaggattggctgaacggcaaagagtacaagtgcaaggtgtccaacaaggccctgcctgctcctatcgagaaaaccatcagcaaggccaagggccagcctagggaaccccaggtttacaccctgcctccatgccgcgaggaaatgaccaagaaccaggtgtccctgtggtgcctggtcaagggcttctacccttccgatatcgccgtggaatgggagagcaatggccagcctgagaacaactacaagacaacccctcctgtgctggacagcgacggctcattcttcctgtacagcaagctgacagtggacaagagcagatggcagcagggcaacgtgttcagctgcagcgtgctgcatgaagccctgcacagccactacacccagaagtccctgtctctgagccccggcaagtgataa

SEQ ID NO: 508 - DNA, 702 bp, synthetic construct
  source 1..702: mol_type = other DNA
gaacccaagagctgcgacaagacccacacctgtcctccatgtcctgctccagaactgctggccggaccttccgtgttcctgtttcctccaaagcctaaggacaccctgatgatcagcagaacccctgaagtgacctgcgtggtggtggatgtgtctcacgaggaccctgaagtgaagttcaattggtacgtggacggcgtggaagtgcacaacgccaagaccaagcctagagaggaacagtacaacagcacctacagagtggtgtccgtgctgaccgtgctgcaccaggattggctgaacggcaaagagtacaagtgcaaggtgtccaacaaggccctgcctctgcctgaggaaaagaccatcagcaaggccaagggccagcctagggaaccccaggtttacacactgcctccaagccgcgaggaaatgaccaagaaccaggtgtccctgacctgcctggtcaagggcttctacccttccgatatcgccgtggaatgggagagcaatggccagcctgagaacaactacaagacaacccctcctgtgctggacagcgacggctcattcttcctgtacagcaagctgaccgtggacaagtccagatggcagcagggcaacgtgttcagctgtagcgtgctgcacgaagccctgcacagccactacacccagaaaagcctgtctctgagccccggcaaatgataa

SEQ ID NO: 509 - DNA, 702 bp, synthetic construct
  source 1..702: mol_type = other DNA
gaacccaagagctgcgacaagacccacacctgtcctccatgtcctgctccagaactgctggccggaccttccgtgttcctgtttcctccaaagcctaaggacaccctgatgatcagcagaacccctgaagtgacctgcgtggtggtggatgtgtctcacgaggaccccgaagtgaagttcaattggtacgtggacggcgtggaagtgcacaacgccaagaccaagcctagagaggaacagtacaacagcacctacagagtggtgtccgtgctgaccgtgctgcaccaggattggctgaacggcaaagagtacaagtgcaaggtgtccaacaaggccctgcctctgcctgaggaaaagaccatcagcaaggccaagggccagcctagggaaccccaagtctgtacactgcctcctagccgcgaggaaatgaccaagaaccaggtgtccctgagctgcgccgtgaagggcttttacccttccgatatcgccgtggaatgggagagcaatggccagcctgagaacaactacaagacaacccctcctgtgctggacagcgacggctcattcttcctggtgtccaagctgacagtggacaagagcagatggcagcagggcaacgtgttcagctgcagcgtgctgcatgaagccctgcacagccactacacccagaagtccctgtctctgagccccggcaagtgataa

SEQ ID NO: 510 - DNA, 702 bp, synthetic construct
  source 1..702: mol_type = other DNA
gaacccaagagctgcgacaagacccacacctgtcctccatgtcctgctccagaactgctggccggaccttccgtgttcctgtttcctccaaagcctaaggacaccctgatgatcagcagaacccctgaagtgacctgcgtggtggtggatgtgtctcacgaggaccccgaagtgaagttcaattggtacgtggacggcgtggaagtgcacaacgccaagaccaagcctagagaggaacagtacaacagcacctacagagtggtgtccgtgctgaccgtgctgcaccaggattggctgaacggcaaagagtacaagtgcaaggtgtccaacaaggccctgcctctgcctgaggaaaagaccatcagcaaggccaagggccagcctagggaaccccaggtttacaccctgcctccatgccgcgaggaaatgacaaagaaccaggtgtccctgtggtgcctggtcaagggcttctacccttccgatatcgccgtggaatgggagagcaatggccagcctgagaacaactacaagacaacccctcctgtgctggacagcgacggctcattcttcctgtacagcaagctgacagtggacaagagcagatggcagcagggcaacgtgttcagctgcagcgtgctgcatgaagccctgcacagccactacacccagaagtccctgtctctgagccccggcaagtgataa

SEQ ID NO: 511 - DNA, 399 bp, synthetic construct; identical to SEQ ID NO: 481
  source 1..399: mol_type = other DNA

SEQ ID NO: 512 - DNA, 996 bp, synthetic construct
  source 1..996: mol_type = other DNA
gcctctacaaagggccctagcgtgttccctctggctcctagcagcaagtcgacatctggcggaacagccgctctgggctgtctggtcaaggactactttcccgagcctgtgacagtgtcctggaactctggcgctctgacaagcggcgtgcacacatttccagccgtgctgcaaagcagcggcctgtactctctgagcagcgtggtcacagtgccaagctctagcctgggcacccagacctacatctgcaatgtgaaccacaagcctagcaacaccaaggtggacaagagagtggaacccaagagctgcgacaagacccacacctgtcctccatgtcctgctccagaactgctggccggaccttccgtgttcctgtttcctccaaagcctaaggacaccctgatgatcagcagaacccctgaagtgacctgcgtggtggtggatgtgtctcacgaggaccctgaagtgaagttcaattggtacgtggacggcgtggaagtgcacaacgccaagaccaagcctagagaggaacagtacaacagcacctacagagtggtgtccgtgctgaccgtgctgcaccaggattggctgaacggcaaagagtacaagtgcaaggtgtccaacaaggccctgcctgcccctgaggaaaagaccatcagcaaggccaagggccagcctagggaaccccaggtttacacactgcctccaagccgcgaggaaatgaccaagaaccaggtgtccctgacctgcctcgtgaagggcttctacccttccgatatcgccgtggaatgggagagcaatggccagcctgagaacaactacaagacaacccctcctgtgctggacagcgacggctcattcttcctgtacagcaagctgaccgtggacaagtccagatggcagcagggcaacgtgttcagctgtagcgtgctgcacgaagccctgcacagccactacacccagaaaagcctgtctctgagccccggcaaatgataa

SEQ ID NO: 513 - DNA, 996 bp, synthetic construct
  source 1..996: mol_type = other DNA
gcctctacaaagggccctagcgtgttccctctggctcctagcagcaagtcgacatctggcggaacagccgctctgggctgtctggtcaaggactactttcccgagcctgtgacagtgtcctggaactctggcgctctgacaagcggcgtgcacacatttccagccgtgctgcaaagcagcggcctgtactctctgagcagcgtggtcacagtgccaagctctagcctgggcacccagacctacatctgcaatgtgaaccacaagcctagcaacaccaaggtggacaagaaggtggaacccaagagctgcgacaagacccacacctgtcctccatgtcctgctccagaactgctcggcggaccttccgtgttcctgtttcctccaaagcctaaggacaccctgatgatcagcagaacccctgaagtgacctgcgtggtggtggatgtgtctcacgaggacccagaagtgaagttcaattggtacgtggacggcgtggaagtgcacaacgccaagaccaagcctagagaggaacagtacaacagcacctacagagtggtgtccgtgctgacagtgctgcaccaggattggctgaacggcaaagagtacaagtgcaaggtgtccaacaaggccctgcctgctcctatcgagaaaaccatcagcaaggccaagggccagcctagggaaccccaggtttacacactgcctccaagccgcgaggaaatgaccaagaaccaggtgtccctgacctgcctcgtgaagggcttctacccttccgatatcgccgtggaatgggagagcaatggccagcctgagaacaactacaagacaacccctcctgtgctggacagcgacggctcattcttcctgtacagcaagctgactgtggataagtcccggtggcagcagggcaacgtgttcagctgttctgtgatgcacgaagccctgcacaaccactacacccagaaaagcctgtctctgagccccggcaagtgataa

SEQ ID NO: 514 - DNA, 996 bp, synthetic construct
  source 1..996: mol_type = other DNA
gcctctacaaagggccctagcgtgttccctctggctcctagcagcaagtcgacatctggcggaacagccgctctgggctgtctggtcaaggactactttcccgagcctgtgacagtgtcctggaactctggcgctctgacaagcggcgtgcacacatttccagccgtgctgcaaagcagcggcctgtactctctgagcagcgtggtcacagtgccaagctctagcctgggcacccagacctacatctgcaatgtgaaccacaagcctagcaacaccaaggtggacaagaaggtggaacccaagagctgcgacaagacccacacctgtcctccatgtcctgctccagaactgctcggcggaccttccgtgttcctgtttcctccaaagcctaaggacaccctgatgatcagcagaacccctgaagtgacctgcgtggtggtggatgtgtctcacgaggacccagaagtgaagttcaattggtacgtggacggcgtggaagtgcacaacgccaagaccaagcctagagaggaacagtacaacagcacctacagagtggtgtccgtgctgacagtgctgcaccaggattggctgaacggcaaagagtacaagtgcaaggtgtccaacaaggccctgcctgctcctatcgagaaaaccatcagcaaggccaagggccagcctagggaaccccaggtttacacactgcctccaagccgcgaggaaatgaccaagaaccaggtgtccctgacctgcctcgtgaagggcttctacccttccgatatcgccgtggaatgggagagcaatggccagcctgagaacaactacaagacaacccctcctgtgctggacagcgacggctcattcttcctgtacagcaagctgaccgtggacaagtccagatggcagcagggcaacgtgttcagctgtagcgtgctgcacgaagccctgcacagccactacacccagaaaagcctgtctctgagccccggcaaatgataa

SEQ ID NO: 515 - DNA, 996 bp, synthetic construct
  source 1..996: mol_type = other DNA
gcctctacaaagggccctagcgtgttccctctggctcctagcagcaagtcgacatctggcggaacagccgctctgggctgtctggtcaaggactactttcccgagcctgtgacagtgtcctggaactctggcgctctgacaagcggcgtgcacacatttccagccgtgctgcaaagcagcggcctgtactctctgagcagcgtggtcacagtgccaagctctagcctgggcacccagacctacatctgcaatgtgaaccacaagcctagcaacaccaaggtggacaagaaggtggaacccaagagctgcgacaagacccacacctgtcctccatgtcctgctccagaactgctcggcggaccttccgtgttcctgtttcctccaaagcctaaggacaccctgatgatcagcagaacccctgaagtgacctgcgtggtggtggatgtgtctcacgaggacccagaagtgaagttcaattggtacgtggacggcgtggaagtgcacaacgccaagaccaagcctagagaggaacagtacaacagcacctacagagtggtgtccgtgctgacagtgctgcaccaggattggctgaacggcaaagagtacaagtgcaaggtgtccaacaaggccctgcctgctcctatcgagaaaaccatcagcaaggccaagggccagcctagggaaccccaggtttacaccctgcctccatgccgcgaggaaatgaccaagaaccaggtgtccctgtggtgcctggtcaagggcttctacccttccgatatcgccgtggaatgggagagcaatggccagcctgagaacaactacaagacaacccctcctgtgctggacagcgacggctcattcttcctgtacagcaagctgacagtggacaagagcagatggcagcagggcaacgtgttcagctgcagcgtgctgcatgaagccctgcacagccactacacccagaagtccctgtctctgagccccggcaagtgataa

SEQ ID NO: 516 - DNA, 996 bp, synthetic construct
  source 1..996: mol_type = other DNA
gcctctacaaagggccctagcgtgttccctctggctcctagcagcaagtcgacatctggcggaacagccgctctgggctgtctggtcaaggactactttcccgagcctgtgacagtgtcctggaactctggcgctctgacaagcggcgtgcacacatttccagccgtgctgcaaagcagcggcctgtactctctgagcagcgtggtcacagtgccaagctctagcctgggcacccagacctacatctgcaatgtgaaccacaagcctagcaacaccaaggtggacaagaaggtggaacccaagagctgcgacaagacccacacctgtcctccatgtcctgctccagaactgctggccggaccttccgtgttcctgtttcctccaaagcctaaggacaccctgatgatcagcagaacccctgaagtgacctgcgtggtggtggatgtgtctcacgaggaccctgaagtgaagttcaattggtacgtggacggcgtggaagtgcacaacgccaagaccaagcctagagaggaacagtacaacagcacctacagagtggtgtccgtgctgaccgtgctgcaccaggattggctgaacggcaaagagtacaagtgcaaggtgtccaacaaggccctgcctctgcctgaggaaaagaccatcagcaaggccaagggccagcctagggaaccccaggtttacacactgcctccaagccgcgaggaaatgaccaagaaccaggtgtccctgacctgcctcgtgaagggcttctacccttccgatatcgccgtggaatgggagagcaatggccagcctgagaacaactacaagacaacccctcctgtgctggacagcgacggctcattcttcctgtacagcaagctgaccgtggacaagtccagatggcagcagggcaacgtgttcagctgtagcgtgctgcacgaagccctgcacagccactacacccagaaaagcctgtctctgagccccggcaaatgataa

SEQ ID NO: 517 - DNA, 996 bp, synthetic construct
  source 1..996: mol_type = other DNA
gcctctacaaagggccctagcgtgttccctctggctcctagcagcaagtcgacatctggcggaacagccgctctgggctgtctggtcaaggactactttcccgagcctgtgacagtgtcctggaactctggcgctctgacaagcggcgtgcacacatttccagccgtgctgcaaagcagcggcctgtactctctgagcagcgtggtcacagtgccaagctctagcctgggcacccagacctacatctgcaatgtgaaccacaagcctagcaacaccaaggtggacaagaaggtggaacccaagagctgcgacaagacccacacctgtcctccatgtcctgctccagaactgctggccggaccttccgtgttcctgtttcctccaaagcctaaggacaccctgatgatcagcagaacccctgaagtgacctgcgtggtggtggatgtgtctcacgaggaccctgaagtgaagttcaattggtacgtggacggcgtggaagtgcacaacgccaagaccaagcctagagaggaacagtacaacagcacctacagagtggtgtccgtgctgaccgtgctgcaccaggattggctgaacggcaaagagtacaagtgcaaggtgtccaacaaggccctgcctgcccctgaggaaaagaccatcagcaaggccaagggccagcctagggaaccccaggtttacacactgcctccaagccgcgaggaaatgaccaagaaccaggtgtccctgacctgcctcgtgaagggcttctacccttccgatatcgccgtggaatgggagagcaatggccagcctgagaacaactacaagacaacccctcctgtgctggacagcgacggctcattcttcctgtacagcaagctgaccgtggacaagtccagatggcagcagggcaacgtgttcagctgtagcgtgctgcacgaagccctgcacagccactacacccagaaaagcctgtctctgagccccggcaaatgataa

SEQ ID NO: 518 - DNA, 996 bp, synthetic construct
  source 1..996: mol_type = other DNA
gcctctacaaagggccctagcgtgttccctctggctcctagcagcaagtcgacatctggcggaacagccgctctgggctgtctggtcaaggactactttcccgagcctgtgacagtgtcctggaactctggcgctctgacaagcggcgtgcacacatttccagccgtgctgcaaagcagcggcctgtactctctgagcagcgtggtcacagtgccaagctctagcctgggcacccagacctacatctgcaatgtgaaccacaagcctagcaacaccaaggtggacaagaaggtggaacccaagagctgcgacaagacccacacctgtcctccatgtcctgctccagaactgctcggcggaccttccgtgttcctgtttcctccaaagcctaaggacaccctgatgatcagcagaacccctgaagtgacctgcgtggtggtggatgtgtctcacgaggacccagaagtgaagttcaattggtacgtggacggcgtggaagtgcacaacgccaagaccaagcctagagaggaacagtacaacagcacctacagagtggtgtccgtgctgacagtgctgcaccaggattggctgaacggcaaagagtacaagtgcaaggtgtccaacaaggccctgcctgctcctatcgagaaaaccatcagcaaggccaagggccagcctagggaaccccaggtttacacactgcctccaagccgcgacgaactgaccaagaaccaggtgtccctgacctgcctcgtgaagggcttctacccttccgatatcgccgtggaatgggagagcaatggccagcctgagaacaactacaagacaacccctcctgtgctggacagcgacggctcattcttcctgtacagcaagctgactgtggataagtcccggtggcagcagggcaacgtgttcagctgttctgtgatgcacgaagccctgcacaaccactacacccagaaaagcctgtctctgagccccggcaagtgataa

SEQ ID NO: 519 - DNA, 996 bp, synthetic construct
  source 1..996: mol_type = other DNA
gcctctacaaagggccctagcgtgttccctctggctcctagcagcaagtcgacatctggcggaacagccgctctgggctgtctggtcaaggactactttcccgagcctgtgacagtgtcctggaactctggcgctctgacaagcggcgtgcacacatttccagccgtgctgcaaagcagcggcctgtactctctgagcagcgtggtcacagtgccaagctctagcctgggcacccagacctacatctgcaatgtgaaccacaagcctagcaacaccaaggtggacaagaaggtggaacccaagagctgcgacaagacccacacctgtcctccatgtcctgctccagaactgctcggcggaccttccgtgttcctgtttcctccaaagcctaaggacaccctgatgatcagcagaacccctgaagtgacctgcgtggtggtggatgtgtctcacgaggacccagaagtgaagttcaattggtacgtggacggcgtggaagtgcacaacgccaagaccaagcctagagaggaacagtacaacagcacctacagagtggtgtccgtgctgacagtgctgcaccaggattggctgaacggcaaagagtacaagtgcaaggtgtccaacaaggccctgcctgctcctatcgagaaaaccatcagcaaggccaagggccagcctagggaaccccaggtttacacactgcctccaagccgcgacgaactgaccaagaaccaggtgtccctgacctgcctcgtgaagggcttctacccttccgatatcgccgtggaatgggagagcaatggccagcctgagaacaactacaagacaacccctcctgtgctggacagcgacggctcattcttcctgtacagcaagctgaccgtggacaagtccagatggcagcagggcaacgtgttcagctgtagcgtgctgcacgaagccctgcacagccactacacccagaaaagcctgtctctgagccccggcaaatgataa

SEQ ID NO: 520 - DNA, 996 bp, synthetic construct
  source 1..996: mol_type = other DNA
gcctctacaaagggccctagcgtgttccctctggctcctagcagcaagtcgacatctggcggaacagccgctctgggctgtctggtcaaggactactttcccgagcctgtgacagtgtcctggaactctggcgctctgacaagcggcgtgcacacatttccagccgtgctgcaaagcagcggcctgtactctctgagcagcgtggtcacagtgccaagctctagcctgggcacccagacctacatctgcaatgtgaaccacaagcctagcaacaccaaggtggacaagaaggtggaacccaagagctgcgacaagacccacacctgtcctccatgtcctgctccagaactgctcggcggaccttccgtgttcctgtttcctccaaagcctaaggacaccctgatgatcagcagaacccctgaagtgacctgcgtggtggtggatgtgtctcacgaggacccagaagtgaagttcaattggtacgtggacggcgtggaagtgcacaacgccaagaccaagcctagagaggaacagtacaacagcacctacagagtggtgtccgtgctgacagtgctgcaccaggattggctgaacggcaaagagtacaagtgcaaggtgtccaacaaggccctgcctgctcctatcgagaaaaccatcagcaaggccaagggccagcctagggaaccccaggtttacaccctgcctccatgccgcgacgaactgaccaagaaccaggtgtccctgtggtgcctggtcaagggcttctacccttccgatatcgccgtggaatgggagagcaatggccagcctgagaacaactacaagacaacccctcctgtgctggacagcgacggctcattcttcctgtacagcaagctgacagtggacaagagcagatggcagcagggcaacgtgttcagctgcagcgtgctgcatgaagccctgcacagccactacacccagaagtccctgtctctgagccccggcaagtgataa

SEQ ID NO: 521 - DNA, 996 bp, synthetic construct
  source 1..996: mol_type = other DNA
gcctctacaaagggccctagcgtgttccctctggctcctagcagcaagtcgacatctggcggaacagccgctctgggctgtctggtcaaggactactttcccgagcctgtgacagtgtcctggaactctggcgctctgacaagcggcgtgcacacatttccagccgtgctgcaaagcagcggcctgtactctctgagcagcgtggtcacagtgccaagctctagcctgggcacccagacctacatctgcaatgtgaaccacaagcctagcaacaccaaggtggacaagaaggtggaacccaagagctgcgacaagacccacacctgtcctccatgtcctgctccagaactgctggccggaccttccgtgttcctgtttcctccaaagcctaaggacaccctgatgatcagcagaacccctgaagtgacctgcgtggtggtggatgtgtctcacgaggaccctgaagtgaagttcaattggtacgtggacggcgtggaagtgcacaacgccaagaccaagcctagagaggaacagtacaacagcacctacagagtggtgtccgtgctgaccgtgctgcaccaggattggctgaacggcaaagagtacaagtgcaaggtgtccaacaaggccctgcctctgcctgaggaaaagaccatcagcaaggccaagggccagcctagggaaccccaggtttacacactgcctccaagccgcgacgaactgaccaagaaccaggtgtccctgacctgcctcgtgaagggcttctacccttccgatatcgccgtggaatgggagagcaatggccagcctgagaacaactacaagacaacccctcctgtgctggacagcgacggctcattcttcctgtacagcaagctgaccgtggacaagtccagatggcagcagggcaacgtgttcagctgtagcgtgctgcacgaagccctgcacagccactacacccagaaaagcctgtctctgagccccggcaaatgataa

SEQ ID NO: 522 - DNA, 996 bp, synthetic construct
  source 1..996: mol_type = other DNA
gcctctacaaagggccctagcgtgttccctctggctcctagcagcaagtcgacatctggcggaacagccgctctgggctgtctggtcaaggactactttcccgagcctgtgacagtgtcctggaactctggcgctctgacaagcggcgtgcacacatttccagccgtgctgcaaagcagcggcctgtactctctgagcagcgtggtcacagtgccaagctctagcctgggcacccagacctacatctgcaatgtgaaccacaagcctagcaacaccaaggtggacaagaaggtggaacccaagagctgcgacaagacccacacctgtcctccatgtcctgctccagaactgctggccggaccttccgtgttcctgtttcctccaaagcctaaggacaccctgatgatcagcagaacccctgaagtgacctgcgtggtggtggatgtgtctcacgaggaccctgaagtgaagttcaattggtacgtggacggcgtggaagtgcacaacgccaagaccaagcctagagaggaacagtacaacagcacctacagagtggtgtccgtgctgaccgtgctgcaccaggattggctgaacggcaaagagtacaagtgcaaggtgtccaacaaggccctgcctgcccctgaggaaaagaccatcagcaaggccaagggccagcctagggaaccccaggtttacacactgcctccaagccgcgacgaactgaccaagaaccaggtgtccctgacctgcctcgtgaagggcttctacccttccgatatcgccgtggaatgggagagcaatggccagcctgagaacaactacaagacaacccctcctgtgctggacagcgacggctcattcttcctgtacagcaagctgaccgtggacaagtccagatggcagcagggcaacgtgttcagctgtagcgtgctgcacgaagccctgcacagccactacacccagaaaagcctgtctctgagccccggcaaatgataa

SEQ ID NO: 523 - DNA, 996 bp, synthetic construct
  source 1..996: mol_type = other DNA
gcctctacaaagggccctagcgtgttccctctggctcctagcagcaagtcgacatctggcggaacagccgctctgggctgtctggtcaaggactactttcccgagcctgtgacagtgtcctggaactctggcgctctgacaagcggcgtgcacacatttccagccgtgctgcaaagcagcggcctgtactctctgagcagcgtggtcacagtgccaagctctagcctgggcacccagacctacatctgcaatgtgaaccacaagcctagcaacaccaaggtggacaagagagtggaacccaagagctgcgacaagacccacacctgtcctccatgtcctgctccagaactgctggccggaccttccgtgttcctgtttcctccaaagcctaaggacaccctgatgatcagcagaacccctgaagtgacctgcgtggtggtggatgtgtctcacgaggaccctgaagtgaagttcaattggtacgtggacggcgtggaagtgcacaacgccaagaccaagcctagagaggaacagtacaacagcacctacagagtggtgtccgtgctgaccgtgctgcaccaggattggctgaacggcaaagagtacaagtgcaaggtgtccaacaaggccctgcctgcccctatcgaaaagaccatcagcaaggccaagggccagcctagggaaccccaggtttacacactgcctccaagccgcgaggaaatgaccaagaaccaggtgtccctgacctgcctcgtgaagggcttctacccttccgatatcgccgtggaatgggagagcaatggccagcctgagaacaactacaagacaacccctcctgtgctggacagcgacggctcattcttcctgtacagcaagctgaccgtggacaagtccagatggcagcagggcaacgtgttcagctgtagcgtgctgcacgaagccctgcacagccactacacccagaaaagcctgtctctgagccccggcaaatgataa

SEQ ID NO: 524 - DNA, 996 bp, synthetic construct
  source 1..996: mol_type = other DNA
gcctctacaaagggccctagcgtgttccctctggctcctagcagcaagtcgacatctggcggaacagccgctctgggctgtctggtcaaggactactttcccgagcctgtgacagtgtcctggaactctggcgctctgacaagcggcgtgcacacatttccagccgtgctgcaaagcagcggcctgtactctctgagcagcgtggtcacagtgccaagctctagcctgggcacccagacctacatctgcaatgtgaaccacaagcctagcaacaccaaggtggacaagagagtggaacccaagagctgcgacaagacccacacctgtcctccatgtcctgctccagaactgctgggcggaccttccgtgttcctgtttcctccaaagcctaaggacaccctgatgatcagcagaacccctgaagtgacctgcgtggtggtggatgtgtctcacgaggaccctgaagtgaagttcaattggtacgtggacggcgtggaagtgcacaacgccaagaccaagcctagagaggaacagtacaacagcacctacagagtggtgtccgtgctgaccgtgctgcaccaggattggctgaacggcaaagagtacaagtgcaaggtgtccaacaaggccctgcctgcccctgaggaaaagaccatcagcaaggccaagggccagcctagggaaccccaggtttacacactgcctccaagccgcgaggaaatgaccaagaaccaggtgtccctgacctgcctcgtgaagggcttctacccttccgatatcgccgtggaatgggagagcaatggccagcctgagaacaactacaagacaacccctcctgtgctggacagcgacggctcattcttcctgtacagcaagctgaccgtggacaagtccagatggcagcagggcaacgtgttcagctgtagcgtgctgcacgaagccctgcacagccactacacccagaaaagcctgtctctgagccccggcaaatgataa

SEQ ID NO: 525 - DNA, 996 bp, synthetic construct
  source 1..996: mol_type = other DNA
gcctctacaaagggccctagcgtgttccctctggctcctagcagcaagtcgacatctggcggaacagccgctctgggctgtctggtcaaggactactttcccgagcctgtgacagtgtcctggaactctggcgctctgacaagcggcgtgcacacatttccagccgtgctgcaaagcagcggcctgtactctctgagcagcgtggtcacagtgccaagctctagcctgggcacccagacctacatctgcaatgtgaaccacaagcctagcaacaccaaggtggacaagagagtggaacccaagagctgcgacaagacccacacctgtcctccatgtcctgctccagaactgctcggcggaccttccgtgttcctgtttcctccaaagcctaaggacaccctgatgatcagcagaacccctgaagtgacctgcgtggtggtggatgtgtctcacgaggacccagaagtgaagttcaattggtacgtggacggcgtggaagtgcacaacgccaagaccaagcctagagaggaacagtacaacagcacctacagagtggtgtccgtgctgacagtgctgcaccaggattggctgaacggcaaagagtacaagtgcaaggtgtccaacaaggccctgcctgctcctatcgagaaaaccatcagcaaggccaagggccagcctcgcgaacctcaagtctgtacactgcctcctagccgcgaggaaatgaccaagaaccaggtgtccctgagctgcgccgtgaagggcttttacccttccgatatcgccgtggaatgggagagcaatggccagcctgagaacaactacaagacaacccctcctgtgctggacagcgacggctcattcttcctggtgtccaagctgacagtggacaagagcagatggcagcagggcaacgtgttcagctgcagcgtgctgcatgaagccctgcacagccactacacccagaagtccctgtctctgagccccggcaagtgataa

SEQ ID NO: 526 - DNA, 996 bp, synthetic construct
  source 1..996: mol_type = other DNA
gcctctacaaagggccctagcgtgttccctctggctcctagcagcaagtcgacatctggcggaacagccgctctgggctgtctggtcaaggactactttcccgagcctgtgacagtgtcctggaactctggcgctctgacaagcggcgtgcacacatttccagccgtgctgcaaagcagcggcctgtactctctgagcagcgtggtcacagtgccaagctctagcctgggcacccagacctacatctgcaatgtgaaccacaagcctagcaacaccaaggtggacaagagagtggaacccaagagctgcgacaagacccacacctgtcctccatgtcctgctccagaactgctggccggaccttccgtgttcctgtttcctccaaagcctaaggacaccctgatgatcagcagaacccctgaagtgacctgcgtggtggtggatgtgtctcacgaggaccctgaagtgaagttcaattggtacgtggacggcgtggaagtgcacaacgccaagaccaagcctagagaggaacagtacaacagcacctacagagtggtgtccgtgctgaccgtgctgcaccaggattggctgaacggcaaagagtacaagtgcaaggtgtccaacaaggccctgcctctgcctgaggaaaagaccatcagcaaggccaagggccagcctcgcgaacctcaagtctgtacactgcctcctagccgcgaggaaatgaccaagaaccaggtgtccctgagctgcgccgtgaagggcttttacccttccgatatcgccgtggaatgggagagcaatggccagcctgagaacaactacaagacaacccctcctgtgctggacagcgacggctcattcttcctggtgtccaagctgacagtggacaagagcagatggcagcagggcaacgtgttcagctgcagcgtgctgcatgaagccctgcacagccactacacccagaagtccctgtctctgagccccggcaagtgataa

SEQ ID NO: 527 - DNA, 996 bp, synthetic construct
  source 1..996: mol_type = other DNA
gcctctacaaagggccctagcgtgttccctctggctcctagcagcaagtcgacatctggcggaacagccgctctgggctgtctggtcaaggactactttcccgagcctgtgacagtgtcctggaactctggcgctctgacaagcggcgtgcacacatttccagccgtgctgcaaagcagcggcctgtactctctgagcagcgtggtcacagtgccaagctctagcctgggcacccagacctacatctgcaatgtgaaccacaagcctagcaacaccaaggtggacaagagagtggaacccaagagctgcgacaagacccacacctgtcctccatgtcctgctccagaactgctggccggaccttccgtgttcctgtttcctccaaagcctaaggacaccctgatgatcagcagaacccctgaagtgacctgcgtggtggtggatgtgtctcacgaggaccctgaagtgaagttcaattggtacgtggacggcgtggaagtgcacaacgccaagaccaagcctagagaggaacagtacaacagcacctacagagtggtgtccgtgctgaccgtgctgcaccaggattggctgaacggcaaagagtacaagtgcaaggtgtccaacaaggccctgcctgcccctgaggaaaagaccatcagcaaggccaagggccagcctcgcgaacctcaagtctgtacactgcctcctagccgcgaggaaatgaccaagaaccaggtgtccctgagctgcgccgtgaagggcttttacccttccgatatcgccgtggaatgggagagcaatggccagcctgagaacaactacaagacaacccctcctgtgctggacagcgacggctcattcttcctggtgtccaagctgacagtggacaagagcagatggcagcagggcaacgtgttcagctgcagcgtgctgcatgaagccctgcacagccactacacccagaagtccctgtctctgagccccggcaagtgataa

SEQ ID NO: 528 - DNA, 996 bp, synthetic construct
  source 1..996: mol_type = other DNA
gcctctacaaagggccctagcgtgttccctctggctcctagcagcaagtcgacatctggcggaacagccgctctgggctgtctggtcaaggactactttcccgagcctgtgacagtgtcctggaactctggcgctctgacaagcggcgtgcacacatttccagccgtgctgcaaagcagcggcctgtactctctgagcagcgtggtcacagtgccaagctctagcctgggcacccagacctacatctgcaatgtgaaccacaagcctagcaacaccaaggtggacaagagagtggaacccaagagctgcgacaagacccacacctgtcctccatgtcctgctccagaactgctggccggaccttccgtgttcctgtttcctccaaagcctaaggacaccctgatgatcagcagaacccctgaagtgacctgcgtggtggtggatgtgtctcacgaggaccctgaagtgaagttcaattggtacgtggacggcgtggaagtgcacaacgccaagaccaagcctagagaggaacagtacaacagcacctacagagtggtgtccgtgctgaccgtgctgcaccaggattggctgaacggcaaagagtacaagtgcaaggtgtccaacaaggccctgcctctgcctgaggaaaagaccatcagcaaggccaagggccagcctagggaaccccaggtttacaccctgcctccatgccgcgaggaaatgaccaagaaccaggtgtccctgtggtgcctggtcaagggcttctacccttccgatatcgccgtggaatgggagagcaatggccagcctgagaacaactacaagacaacccctcctgtgctggacagcgacggctcattcttcctgtacagcaagctgacagtggacaagagcagatggcagcagggcaacgtgttcagctgcagcgtgctgcatgaagccctgcacagccactacacccagaagtccctgtctctgagccccggcaagtgataa

SEQ ID NO: 529 - DNA, 996 bp, synthetic construct
  source 1..996: mol_type = other DNA
gcctctacaaagggccctagcgtgttccctctggctcctagcagcaagtcgacatctggcggaacagccgctctgggctgtctggtcaaggactactttcccgagcctgtgacagtgtcctggaactctggcgctctgacaagcggcgtgcacacatttccagccgtgctgcaaagcagcggcctgtactctctgagcagcgtggtcacagtgccaagctctagcctgggcacccagacctacatctgcaatgtgaaccacaagcctagcaacaccaaggtggacaagagagtggaacccaagagctgcgacaagacccacacctgtcctccatgtcctgctccagaactgctggccggaccttccgtgttcctgtttcctccaaagcctaaggacaccctgatgatcagcagaacccctgaagtgacctgcgtggtggtggatgtgtctcacgaggaccctgaagtgaagttcaattggtacgtggacggcgtggaagtgcacaacgccaagaccaagcctagagaggaacagtacaacagcacctacagagtggtgtccgtgctgaccgtgctgcaccaggattggctgaacggcaaagagtacaagtgcaaggtgtccaacaaggccctgcctgcccctgaggaaaagaccatcagcaaggccaagggccagcctagggaaccccaggtttacaccctgcctccatgccgcgaggaaatgaccaagaaccaggtgtccctgtggtgcctggtcaagggcttctacccttccgatatcgccgtggaatgggagagcaatggccagcctgagaacaactacaagacaacccctcctgtgctggacagcgacggctcattcttcctgtacagcaagctgacagtggacaagagcagatggcagcagggcaacgtgttcagctgcagcgtgctgcatgaagccctgcacagccactacacccagaagtccctgtctctgagccccggcaagtgataa

SEQ ID NO: 530 - DNA, 996 bp, synthetic construct
  source 1..996: mol_type = other DNA
gcctctacaaagggccctagcgtgttccctctggctcctagcagcaagtcgacatctggcggaacagccgctctgggctgtctggtcaaggactactttcccgagcctgtgacagtgtcctggaactctggcgctctgacaagcggcgtgcacacatttccagccgtgctgcaaagcagcggcctgtactctctgagcagcgtggtcacagtgccaagctctagcctgggcacccagacctacatctgcaatgtgaaccacaagcctagcaacaccaaggtggacaagaaggtggaacccaagagctgcgacaagacccacacctgtcctccatgtcctgctccagaactgctggccggaccttccgtgttcctgtttcctccaaagcctaaggacaccctgatgatcagcagaacccctgaagtgacctgcgtggtggtggatgtgtctcacgaggaccctgaagtgaagttcaattggtacgtggacggcgtggaagtgcacaacgccaagaccaagcctagagaggaacagtacaacagcacctacagagtggtgtccgtgctgaccgtgctgcaccaggattggctgaacggcaaagagtacaagtgcaaggtgtccaacaaggccctgcctgcccctatcgaaaagaccatcagcaaggccaagggccagcctagggaaccccaggtttacacactgcctccaagccgcgaggaaatgaccaagaaccaggtgtccctgacctgcctcgtgaagggcttctacccttccgatatcgccgtggaatgggagagcaatggccagcctgagaacaactacaagacaacccctcctgtgctggacagcgacggctcattcttcctgtacagcaagctgaccgtggacaagtccagatggcagcagggcaacgtgttcagctgtagcgtgctgcacgaagccctgcacagccactacacccagaaaagcctgtctctgagccccggcaaatgataa

SEQ ID NO: 531 - DNA, 996 bp, synthetic construct
  source 1..996: mol_type = other DNA
gcctctacaaagggccctagcgtgttccctctggctcctagcagcaagtcgacatctggcggaacagccgctctgggctgtctggtcaaggactactttcccgagcctgtgacagtgtcctggaactctggcgctctgacaagcggcgtgcacacatttccagccgtgctgcaaagcagcggcctgtactctctgagcagcgtggtcacagtgccaagctctagcctgggcacccagacctacatctgcaatgtgaaccacaagcctagcaacaccaaggtggacaagaaggtggaacccaagagctgcgacaagacccacacctgtcctccatgtcctgctccagaactgctgggcggaccttccgtgttcctgtttcctccaaagcctaaggacaccctgatgatcagcagaacccctgaagtgacctgcgtggtggtggatgtgtctcacgaggaccctgaagtgaagttcaattggtacgtggacggcgtggaagtgcacaacgccaagaccaagcctagagaggaacagtacaacagcacctacagagtggtgtccgtgctgaccgtgctgcaccaggattggctgaacggcaaagagtacaagtgcaaggtgtccaacaaggccctgcctgcccctgaggaaaagaccatcagcaaggccaagggccagcctagggaaccccaggtttacacactgcctccaagccgcgaggaaatgaccaagaaccaggtgtccctgacctgcctcgtgaagggcttctacccttccgatatcgccgtggaatgggagagcaatggccagcctgagaacaactacaagacaacccctcctgtgctggacagcgacggctcattcttcctgtacagcaagctgaccgtggacaagtccagatggcagcagggcaacgtgttcagctgtagcgtgctgcacgaagccctgcacagccactacacccagaaaagcctgtctctgagccccggcaaatgataa

SEQ ID NO: 532 - DNA, 996 bp, synthetic construct
  source 1..996: mol_type = other DNA
gcctctacaaagggccctagcgtgttccctctggctcctagcagcaagtcgacatctggcggaacagccgctctgggctgtctggtcaaggactactttcccgagcctgtgacagtgtcctggaactctggcgctctgacaagcggcgtgcacacatttccagccgtgctgcaaagcagcggcctgtactctctgagcagcgtggtcacagtgccaagctctagcctgggcacccagacctacatctgcaatgtgaaccacaagcctagcaacaccaaggtggacaagaaggtggaacccaagagctgcgacaagacccacacctgtcctccatgtcctgctccagaactgctcggcggaccttccgtgttcctgtttcctccaaagcctaaggacaccctgatgatcagcagaacccctgaagtgacctgcgtggtggtggatgtgtctcacgaggacccagaagtgaagttcaattggtacgtggacggcgtggaagtgcacaacgccaagaccaagcctagagaggaacagtacaacagcacctacagagtggtgtccgtgctgacagtgctgcaccaggattggctgaacggcaaagagtacaagtgcaaggtgtccaacaaggccctgcctgctcctatcgagaaaaccatcagcaaggccaagggccagcctcgcgaacctcaagtctgtacactgcctcctagccgcgaggaaatgaccaagaaccaggtgtccctgagctgcgccgtgaagggcttttacccttccgatatcgccgtggaatgggagagcaatggccagcctgagaacaactacaagacaacccctcctgtgctggacagcgacggctcattcttcctggtgtccaagctgacagtggacaagagcagatggcagcagggcaacgtgttcagctgcagcgtgctgcatgaagccctgcacagccactacacccagaagtccctgtctctgagccccggcaagtgataa

SEQ ID NO: 533 - DNA, 996 bp, synthetic construct
  source 1..996: mol_type = other DNA
gcctctacaaagggccctagcgtgttccctctggctcctagcagcaagtcgacatctggcggaacagccgctctgggctgtctggtcaaggactactttcccgagcctgtgacagtgtcctggaactctggcgctctgacaagcggcgtgcacacatttccagccgtgctgcaaagcagcggcctgtactctctgagcagcgtggtcacagtgccaagctctagcctgggcacccagacctacatctgcaatgtgaaccacaagcctagcaacaccaaggtggacaagaaggtggaacccaagagctgcgacaagacccacacctgtcctccatgtcctgctccagaactgctggccggaccttccgtgttcctgtttcctccaaagcctaaggacaccctgatgatcagcagaacccctgaagtgacctgcgtggtggtggatgtgtctcacgaggaccctgaagtgaagttcaattggtacgtggacggcgtggaagtgcacaacgccaagaccaagcctagagaggaacagtacaacagcacctacagagtggtgtccgtgctgaccgtgctgcaccaggattggctgaacggcaaagagtacaagtgcaaggtgtccaacaaggccctgcctctgcctgaggaaaagaccatcagcaaggccaagggccagcctcgcgaacctcaagtctgtacactgcctcctagccgcgaggaaatgaccaagaaccaggtgtccctgagctgcgccgtgaagggcttttacccttccgatatcgccgtggaatgggagagcaatggccagcctgagaacaactacaagacaacccctcctgtgctggacagcgacggctcattcttcctggtgtccaagctgacagtggacaagagcagatggcagcagggcaacgtgttcagctgcagcgtgctgcatgaagccctgcacagccactacacccagaagtccctgtctctgagccccggcaagtgataa

SEQ ID NO: 534 - DNA, 996 bp, synthetic construct
  source 1..996: mol_type = other DNA
gcctctacaaagggccctagcgtgttccctctggctcctagcagcaagtcgacatctggcggaacagccgctctgggctgtctggtcaaggactactttcccgagcctgtgacagtgtcctggaactctggcgctctgacaagcggcgtgcacacatttccagccgtgctgcaaagcagcggcctgtactctctgagcagcgtggtcacagtgccaagctctagcctgggcacccagacctacatctgcaatgtgaaccacaagcctagcaacaccaaggtggacaagaaggtggaacccaagagctgcgacaagacccacacctgtcctccatgtcctgctccagaactgctggccggaccttccgtgttcctgtttcctccaaagcctaaggacaccctgatgatcagcagaacccctgaagtgacctgcgtggtggtggatgtgtctcacgaggaccctgaagtgaagttcaattggtacgtggacggcgtggaagtgcacaacgccaagaccaagcctagagaggaacagtacaacagcacctacagagtggtgtccgtgctgaccgtgctgcaccaggattggctgaacggcaaagagtacaagtgcaaggtgtccaacaaggccctgcctgcccctgaggaaaagaccatcagcaaggccaagggccagcctcgcgaacctcaagtctgtacactgcctcctagccgcgaggaaatgaccaagaaccaggtgtccctgagctgcgccgtgaagggcttttacccttccgatatcgccgtggaatgggagagcaatggccagcctgagaacaactacaagacaacccctcctgtgctggacagcgacggctcattcttcctggtgtccaagctgacagtggacaagagcagatggcagcagggcaacgtgttcagctgcagcgtgctgcatgaagccctgcacagccactacacccagaagtccctgtctctgagccccggcaagtgataa

SEQ ID NO: 535 - DNA, 996 bp, synthetic construct
  source 1..996: mol_type = other DNA
gcctctacaaagggccctagcgtgttccctctggctcctagcagcaagtcgacatctggcggaacagccgctctgggctgtctggtcaaggactactttcccgagcctgtgacagtgtcctggaactctggcgctctgacaagcggcgtgcacacatttccagccgtgctgcaaagcagcggcctgtactctctgagcagcgtggtcacagtgccaagctctagcctgggcacccagacctacatctgcaatgtgaaccacaagcctagcaacaccaaggtggacaagaaggtggaacccaagagctgcgacaagacccacacctgtcctccatgtcctgctccagaactgctggccggaccttccgtgttcctgtttcctccaaagcctaaggacaccctgatgatcagcagaacccctgaagtgacctgcgtggtggtggatgtgtctcacgaggaccctgaagtgaagttcaattggtacgtggacggcgtggaagtgcacaacgccaagaccaagcctagagaggaacagtacaacagcacctacagagtggtgtccgtgctgaccgtgctgcaccaggattggctgaacggcaaagagtacaagtgcaaggtgtccaacaaggccctgcctctgcctgaggaaaagaccatcagcaaggccaagggccagcctagggaaccccaggtttacaccctgcctccatgccgcgaggaaatgaccaagaaccaggtgtccctgtggtgcctggtcaagggcttctacccttccgatatcgccgtggaatgggagagcaatggccagcctgagaacaactacaagacaacccctcctgtgctggacagcgacggctcattcttcctgtacagcaagctgacagtggacaagagcagatggcagcagggcaacgtgttcagctgcagcgtgctgcatgaagccctgcacagccactacacccagaagtccctgtctctgagccccggcaagtgataa

SEQ ID NO: 536 - DNA, 996 bp, synthetic construct
  source 1..996: mol_type = other DNA
gcctctacaaagggccctagcgtgttccctctggctcctagcagcaagtcgacatctggcggaacagccgctctgggctgtctggtcaaggactactttcccgagcctgtgacagtgtcctggaactctggcgctctgacaagcggcgtgcacacatttccagccgtgctgcaaagcagcggcctgtactctctgagcagcgtggtcacagtgccaagctctagcctgggcacccagacctacatctgcaatgtgaaccacaagcctagcaacaccaaggtggacaagaaggtggaacccaagagctgcgacaagacccacacctgtcctccatgtcctgctccagaactgctggccggaccttccgtgttcctgtttcctccaaagcctaaggacaccctgatgatcagcagaacccctgaagtgacctgcgtggtggtggatgtgtctcacgaggaccctgaagtgaagttcaattggtacgtggacggcgtggaagtgcacaacgccaagaccaagcctagagaggaacagtacaacagcacctacagagtggtgtccgtgctgaccgtgctgcaccaggattggctgaacggcaaagagtacaagtgcaaggtgtccaacaaggccctgcctgcccctgaggaaaagaccatcagcaaggccaagggccagcctagggaaccccaggtttacaccctgcctccatgccgcgaggaaatgaccaagaaccaggtgtccctgtggtgcctggtcaagggcttctacccttccgatatcgccgtggaatgggagagcaatggccagcctgagaacaactacaagacaacccctcctgtgctggacagcgacggctcattcttcctgtacagcaagctgacagtggacaagagcagatggcagcagggcaacgtgttcagctgcagcgtgctgcatgaagccctgcacagccactacacccagaagtccctgtctctgagccccggcaagtgataa

SEQ ID NO: 537 - DNA, 996 bp, synthetic construct
  source 1..996: mol_type = other DNA
gcctctacaaagggccctagcgtgttccctctggctcctagcagcaagtcgacatctggcggaacagccgctctgggctgtctggtcaaggactactttcccgagcctgtgacagtgtcctggaactctggcgctctgacaagcggcgtgcacacatttccagccgtgctgcaaagcagcggcctgtactctctgagcagcgtggtcacagtgccaagctctagcctgggcacccagacctacatctgcaatgtgaaccacaagcctagcaacaccaaggtggacaagaaggtggaacccaagagctgcgacaagacccacacctgtcctccatgtcctgctccagaactgctggccggaccttccgtgttcctgtttcctccaaagcctaaggacaccctgatgatcagcagaacccctgaagtgacctgcgtggtggtggatgtgtctcacgaggaccctgaagtgaagttcaattggtacgtggacggcgtggaagtgcacaacgccaagaccaagcctagagaggaacagtacaacagcacctacagagtggtgtccgtgctgaccgtgctgcaccaggattggctgaacggcaaagagtacaagtgcaaggtgtccaacaaggccctgcctgcccctatcgaaaagaccatcagcaaggccaagggccagcctagggaaccccaggtttacacactgcctccaagccgcgacgaactgaccaagaaccaggtgtccctgacctgcctcgtgaagggcttctacccttccgatatcgccgtggaatgggagagcaatggccagcctgagaacaactacaagacaacccctcctgtgctggacagcgacggctcattcttcctgtacagcaagctgaccgtggacaagtccagatggcagcagggcaacgtgttcagctgtagcgtgctgcacgaagccctgcacagccactacacccagaaaagcctgtctctgagccccggcaaatgataa

SEQ ID NO: 538 - DNA, 996 bp, synthetic construct
  source 1..996: mol_type = other DNA
gcctctacaaagggccctagcgtgttccctctggctcctagcagcaagtcgacatctggcggaacagccgctctgggctgtctggtcaaggactactttcccgagcctgtgacagtgtcctggaactctggcgctctgacaagcggcgtgcacacatttccagccgtgctgcaaagcagcggcctgtactctctgagcagcgtggtcacagtgccaagctctagcctgggcacccagacctacatctgcaatgtgaaccacaagcctagcaacaccaaggtggacaagaaggtggaacccaagagctgcgacaagacccacacctgtcctccatgtcctgctccagaactgctgggcggaccttccgtgttcctgtttcctccaaagcctaaggacaccctgatgatcagcagaacccctgaagtgacctgcgtggtggtggatgtgtctcacgaggaccctgaagtgaagttcaattggtacgtggacggcgtggaagtgcacaacgccaagaccaagcctagagaggaacagtacaacagcacctacagagtggtgtccgtgctgaccgtgctgcaccaggattggctgaacggcaaagagtacaagtgcaaggtgtccaacaaggccctgcctgcccctgaggaaaagaccatcagcaaggccaagggccagcctagggaaccccaggtttacacactgcctccaagccgcgacgaactgaccaagaaccaggtgtccctgacctgcctcgtgaagggcttctacccttccgatatcgccgtggaatgggagagcaatggccagcctgagaacaactacaagacaacccctcctgtgctggacagcgacggctcattcttcctgtacagcaagctgaccgtggacaagtccagatggcagcagggcaacgtgttcagctgtagcgtgctgcacgaagccctgcacagccactacacccagaaaagcctgtctctgagccccggcaaatgataa

SEQ ID NO: 539 - DNA, 996 bp, synthetic construct
  source 1..996: mol_type = other DNA
gcctctacaaagggccctagcgtgttccctctggctcctagcagcaagtcgacatctggcggaacagccgctctgggctgtctggtcaaggactactttcccgagcctgtgacagtgtcctggaactctggcgctctgacaagcggcgtgcacacatttccagccgtgctgcaaagcagcggcctgtactctctgagcagcgtggtcacagtgccaagctctagcctgggcacccagacctacatctgcaatgtgaaccacaagcctagcaacaccaaggtggacaagaaggtggaacccaagagctgcgacaagacccacacctgtcctccatgtcctgctccagaactgctcggcggaccttccgtgttcctgtttcctccaaagcctaaggacaccctgatgatcagcagaacccctgaagtgacctgcgtggtggtggatgtgtctcacgaggacccagaagtgaagttcaattggtacgtggacggcgtggaagtgcacaacgccaagaccaagcctagagaggaacagtacaacagcacctacagagtggtgtccgtgctgacagtgctgcaccaggattggctgaacggcaaagagtacaagtgcaaggtgtccaacaaggccctgcctgctcctatcgagaaaaccatcagcaaggccaagggccagcctcgcgaacctcaagtctgtacactgcctcctagccgcgacgaactgaccaagaaccaggtgtccctgagctgcgccgtgaagggcttttacccttccgatatcgccgtggaatgggagagcaatggccagcctgagaacaactacaagacaacccctcctgtgctggacagcgacggctcattcttcctggtgtccaagctgacagtggacaagagcagatggcagcagggcaacgtgttcagctgcagcgtgctgcatgaagccctgcacagccactacacccagaagtccctgtctctgagccccggcaagtgataa

SEQ ID NO: 540 - DNA, 996 bp, synthetic construct
  source 1..996: mol_type = other DNA
gcctctacaaagggccctagcgtgttccctctggctcctagcagcaagtcgacatctggcggaacagccgctctgggctgtctggtcaaggactactttcccgagcctgtgacagtgtcctggaactctggcgctctgacaagcggcgtgcacacatttccagccgtgctgcaaagcagcggcctgtactctctgagcagcgtggtcacagtgccaagctctagcctgggcacccagacctacatctgcaatgtgaaccacaagcctagcaacaccaaggtggacaagaaggtggaacccaagagctgcgacaagacccacacctgtcctccatgtcctgctccagaactgctggccggaccttccgtgttcctgtttcctccaaagcctaaggacaccctgatgatcagcagaacccctgaagtgacctgcgtggtggtggatgtgtctcacgaggaccctgaagtgaagttcaattggtacgtggacggcgtggaagtgcacaacgccaagaccaagcctagagaggaacagtacaacagcacctacagagtggtgtccgtgctgaccgtgctgcaccaggattggctgaacggcaaagagtacaagtgcaaggtgtccaacaaggccctgcctctgcctgaggaaaagaccatcagcaaggccaagggccagcctcgcgaacctcaagtctgtacactgcctcctagccgcgacgaactgaccaagaaccaggtgtccctgagctgcgccgtgaagggcttttacccttccgatatcgccgtggaatgggagagcaatggccagcctgagaacaactacaagacaacccctcctgtgctggacagcgacggctcattcttcctggtgtccaagctgacagtggacaagagcagatggcagcagggcaacgtgttcagctgcagcgtgctgcatgaagccctgcacagccactacacccagaagtccctgtctctgagccccggcaagtgataa

SEQ ID NO: 541 - DNA, 996 bp, synthetic construct
  source 1..996: mol_type = other DNA
gcctctacaaagggccctagcgtgttccctctggctcctagcagcaagtcgacatctggcggaacagccgctctgggctgtctggtcaaggactactttcccgagcctgtgacagtgtcctggaactctggcgctctgacaagcggcgtgcacacatttccagccgtgctgcaaagcagcggcctgtactctctgagcagcgtggtcacagtgccaagctctagcctgggcacccagacctacatctgcaatgtgaaccacaagcctagcaacaccaaggtggacaagaaggtggaacccaagagctgcgacaagacccacacctgtcctccatgtcctgctccagaactgctggccggaccttccgtgttcctgtttcctccaaagcctaaggacaccctgatgatcagcagaacccctgaagtgacctgcgtggtggtggatgtgtctcacgaggaccctgaagtgaagttcaattggtacgtggacggcgtggaagtgcacaacgccaagaccaagcctagagaggaacagtacaacagcacctacagagtggtgtccgtgctgaccgtgctgcaccaggattggctgaacggcaaagagtacaagtgcaaggtgtccaacaaggccctgcctgcccctgaggaaaagaccatcagcaaggccaagggccagcctcgcgaacctcaagtctgtacactgcctcctagccgcgacgaactgaccaagaaccaggtgtccctgagctgcgccgtgaagggcttttacccttccgatatcgccgtggaatgggagagcaatggccagcctgagaacaactacaagacaacccctcctgtgctggacagcgacggctcattcttcctggtgtccaagctgacagtggacaagagcagatggcagcagggcaacgtgttcagctgcagcgtgctgcatgaagccctgcacagccactacacccagaagtccctgtctctgagccccggcaagtgataa

SEQ ID NO: 542 - DNA, 996 bp, synthetic construct
  source 1..996: mol_type = other DNA
gcctctacaaagggccctagcgtgttccctctggctcctagcagcaagtcgacatctggcggaacagccgctctgggctgtctggtcaaggactactttcccgagcctgtgacagtgtcctggaactctggcgctctgacaagcggcgtgcacacatttccagccgtgctgcaaagcagcggcctgtactctctgagcagcgtggtcacagtgccaagctctagcctgggcacccagacctacatctgcaatgtgaaccacaagcctagcaacaccaaggtggacaagaaggtggaacccaagagctgcgacaagacccacacctgtcctccatgtcctgctccagaactgctggccggaccttccgtgttcctgtttcctccaaagcctaaggacaccctgatgatcagcagaacccctgaagtgacctgcgtggtggtggatgtgtctcacgaggaccctgaagtgaagttcaattggtacgtggacggcgtggaagtgcacaacgccaagaccaagcctagagaggaacagtacaacagcacctacagagtggtgtccgtgctgaccgtgctgcaccaggattggctgaacggcaaagagtacaagtgcaaggtgtccaacaaggccctgcctctgcctgaggaaaagaccatcagcaaggccaagggccagcctagggaaccccaggtttacaccctgcctccatgccgcgacgaactgaccaagaaccaggtgtccctgtggtgcctggtcaagggcttctacccttccgatatcgccgtggaatgggagagcaatggccagcctgagaacaactacaagacaacccctcctgtgctggacagcgacggctcattcttcctgtacagcaagctgacagtggacaagagcagatggcagcagggcaacgtgttcagctgcagcgtgctgcatgaagccctgcacagccactacacccagaagtccctgtctctgagccccggcaagtgataa

SEQ ID NO: 543 - DNA, 996 bp, synthetic construct
  source 1..996: mol_type = other DNA
gcctctacaaagggccctagcgtgttccctctggctcctagcagcaagtcgacatctggcggaacagccgctctgggctgtctggtcaaggactactttcccgagcctgtgacagtgtcctggaactctggcgctctgacaagcggcgtgcacacatttccagccgtgctgcaaagcagcggcctgtactctctgagcagcgtggtcacagtgccaagctctagcctgggcacccagacctacatctgcaatgtgaaccacaagcctagcaacaccaaggtggacaagaaggtggaacccaagagctgcgacaagacccacacctgtcctccatgtcctgctccagaactgctggccggaccttccgtgttcctgtttcctccaaagcctaaggacaccctgatgatcagcagaacccctgaagtgacctgcgtggtggtggatgtgtctcacgaggaccctgaagtgaagttcaattggtacgtggacggcgtggaagtgcacaacgccaagaccaagcctagagaggaacagtacaacagcacctacagagtggtgtccgtgctgaccgtgctgcaccaggattggctgaacggcaaagagtacaagtgcaaggtgtccaacaaggccctgcctgcccctgaggaaaagaccatcagcaaggccaagggccagcctagggaaccccaggtttacaccctgcctccatgccgcgacgaactgaccaagaaccaggtgtccctgtggtgcctggtcaagggcttctacccttccgatatcgccgtggaatgggagagcaatggccagcctgagaacaactacaagacaacccctcctgtgctggacagcgacggctcattcttcctgtacagcaagctgacagtggacaagagcagatggcagcagggcaacgtgttcagctgcagcgtgctgcatgaagccctgcacagccactacacccagaagtccctgtctctgagccccggcaagtgataa

SEQ ID NO: 544 - DNA, 702 bp, synthetic construct
  source 1..702: mol_type = other DNA
gaacctaagagcagcgacaagacccacacctgtcctccatgtcctgctccagaactgctcggcggaccttccgtgttcctgtttcctccaaagcctaaggacaccctgatgatcagcagaacccctgaagtgacctgcgtggtggtggatgtgtctcacgaggacccagaagtgaagttcaattggtacgtggacggcgtggaagtgcacaacgccaagaccaagcctagagaggaacagtacaacagcacctacagagtggtgtccgtgctgacagtgctgcaccaggattggctgaacggcaaagagtacaagtgcaaggtgtccaacaaggccctgcctgctcctatcgagaaaaccatcagcaaggccaagggccagcctcgcgaacctcaagtctgtacactgcctcctagccgcgaggaaatgaccaagaaccaggtgtccctgagctgcgccgtgaagggcttttacccttccgatatcgccgtggaatgggagagcaatggccagcctgagaacaactacaagacaacccctcctgtgctggacagcgacggctcattcttcctggtgtccaagctgacagtggacaagagcagatggcagcagggcaacgtgttcagctgcagcgtgctgcatgaagccctgcacagccactacacccagaagtccctgtctctgagccccggcaagtgataa

SEQ ID NO: 545 - DNA, 702 bp, synthetic construct
  source 1..702: mol_type = other DNA
gaacctaagagcagcgacaagacccacacctgtcctccatgtcctgctccagaactgctggccggaccttccgtgttcctgtttcctccaaagcctaaggacaccctgatgatcagcagaacccctgaagtgacctgcgtggtggtggatgtgtctcacgaggaccctgaagtgaagttcaattggtacgtggacggcgtggaagtgcacaacgccaagaccaagcctagagaggaacagtacaacagcacctacagagtggtgtccgtgctgaccgtgctgcaccaggattggctgaacggcaaagagtacaagtgcaaggtgtccaacaaggccctgcctctgcctgaggaaaagaccatcagcaaggccaagggccagcctcgcgaacctcaagtctgtacactgcctcctagccgcgaggaaatgaccaagaaccaggtgtccctgagctgcgccgtgaagggcttttacccttccgatatcgccgtggaatgggagagcaatggccagcctgagaacaactacaagacaacccctcctgtgctggacagcgacggctcattcttcctggtgtccaagctgacagtggacaagagcagatggcagcagggcaacgtgttcagctgcagcgtgctgcatgaagccctgcacagccactacacccagaagtccctgtctctgagccccggcaagtgataa

SEQ ID NO: 546 - DNA, 702 bp, synthetic construct
  source 1..702: mol_type = other DNA
gaacctaagagcagcgacaagacccacacctgtcctccatgtcctgctccagaactgctggccggaccttccgtgttcctgtttcctccaaagcctaaggacaccctgatgatcagcagaacccctgaagtgacctgcgtggtggtggatgtgtctcacgaggaccctgaagtgaagttcaattggtacgtggacggcgtggaagtgcacaacgccaagaccaagcctagagaggaacagtacaacagcacctacagagtggtgtccgtgctgaccgtgctgcaccaggattggctgaacggcaaagagtacaagtgcaaggtgtccaacaaggccctgcctgcccctgaggaaaagaccatcagcaaggccaagggccagcctcgcgaacctcaagtctgtacactgcctcctagccgcgaggaaatgaccaagaaccaggtgtccctgagctgcgccgtgaagggcttttacccttccgatatcgccgtggaatgggagagcaatggccagcctgagaacaactacaagacaacccctcctgtgctggacagcgacggctcattcttcctggtgtccaagctgacagtggacaagagcagatggcagcagggcaacgtgttcagctgcagcgtgctgcatgaagccctgcacagccactacacccagaagtccctgtctctgagccccggcaagtgataa

SEQ ID NO: 547 - DNA, 702 bp, synthetic construct
  source 1..702: mol_type = other DNA
gaacctaagagcagcgacaagacccacacctgtcctccatgtcctgctccagaactgctcggcggaccttccgtgttcctgtttcctccaaagcctaaggacaccctgatgatcagcagaacccctgaagtgacctgcgtggtggtggatgtgtctcacgaggacccagaagtgaagttcaattggtacgtggacggcgtggaagtgcacaacgccaagaccaagcctagagaggaacagtacaacagcacctacagagtggtgtccgtgctgacagtgctgcaccaggattggctgaacggcaaagagtacaagtgcaaggtgtccaacaaggccctgcctgctcctatcgagaaaaccatcagcaaggccaagggccagcctagggaaccccaggtttacaccctgcctccatgccgcgaggaaatgaccaagaaccaggtgtccctgtggtgcctggtcaagggcttctacccttccgatatcgccgtggaatgggagagcaatggccagcctgagaacaactacaagacaacccctcctgtgctggacagcgacggctcattcttcctgtacagcaagctgacagtggacaagagcagatggcagcagggcaacgtgttcagctgcagcgtgctgcatgaagccctgcacagccactacacccagaagtccctgtctctgagccccggcaagtgataa

SEQ ID NO: 548 - DNA, 702 bp, synthetic construct
  source 1..702: mol_type = other DNA
gaacctaagagcagcgacaagacccacacctgtcctccatgtcctgctccagaactgctggccggaccttccgtgttcctgtttcctccaaagcctaaggacaccctgatgatcagcagaacccctgaagtgacctgcgtggtggtggatgtgtctcacgaggaccctgaagtgaagttcaattggtacgtggacggcgtggaagtgcacaacgccaagaccaagcctagagaggaacagtacaacagcacctacagagtggtgtccgtgctgaccgtgctgcaccaggattggctgaacggcaaagagtacaagtgcaaggtgtccaacaaggccctgcctctgcctgaggaaaagaccatcagcaaggccaagggccagcctagggaaccccaggtttacaccctgcctccatgccgcgaggaaatgaccaagaaccaggtgtccctgtggtgcctggtcaagggcttctacccttccgatatcgccgtggaatgggagagcaatggccagcctgagaacaactacaagacaacccctcctgtgctggacagcgacggctcattcttcctgtacagcaagctgacagtggacaagagcagatggcagcagggcaacgtgttcagctgcagcgtgctgcatgaagccctgcacagccactacacccagaagtccctgtctctgagccccggcaagtgataa

SEQ ID NO: 549 - DNA, 702 bp, synthetic construct
  source 1..702: mol_type = other DNA
gaacctaagagcagcgacaagacccacacctgtcctccatgtcctgctccagaactgctggccggaccttccgtgttcctgtttcctccaaagcctaaggacaccctgatgatcagcagaacccctgaagtgacctgcgtggtggtggatgtgtctcacgaggaccctgaagtgaagttcaattggtacgtggacggcgtggaagtgcacaacgccaagaccaagcctagagaggaacagtacaacagcacctacagagtggtgtccgtgctgaccgtgctgcaccaggattggctgaacggcaaagagtacaagtgcaaggtgtccaacaaggccctgcctgcccctgaggaaaagaccatcagcaaggccaagggccagcctagggaaccccaggtttacaccctgcctccatgccgcgaggaaatgaccaagaaccaggtgtccctgtggtgcctggtcaagggcttctacccttccgatatcgccgtggaatgggagagcaatggccagcctgagaacaactacaagacaacccctcctgtgctggacagcgacggctcattcttcctgtacagcaagctgacagtggacaagagcagatggcagcagggcaacgtgttcagctgcagcgtgctgcatgaagccctgcacagccactacacccagaagtccctgtctctgagccccggcaagtgataa

SEQ ID NO: 550 - DNA, 702 bp, synthetic construct; identical to SEQ ID NO: 544
  source 1..702: mol_type = other DNA

SEQ ID NO: 551 - DNA, 702 bp, synthetic construct; identical to SEQ ID NO: 545
  source 1..702: mol_type = other DNA

SEQ ID NO: 552 - DNA, 702 bp, synthetic construct; identical to SEQ ID NO: 546
  source 1..702: mol_type = other DNA

SEQ ID NO: 553 - DNA, 702 bp, synthetic construct; identical to SEQ ID NO: 547
  source 1..702: mol_type = other DNA

SEQ ID NO: 554 - DNA, 702 bp, synthetic construct; identical to SEQ ID NO: 548
  source 1..702: mol_type = other DNA

SEQ ID NO: 555 - DNA, 702 bp, synthetic construct; identical to SEQ ID NO: 549
  source 1..702: mol_type = other DNA

SEQ ID NO: 556 - DNA, 702 bp, synthetic construct
  source 1..702: mol_type = other DNA
gaacctaagagcagcgacaagacccacacctgtcctccatgtcctgctccagaactgctcggcggaccttccgtgttcctgtttcctccaaagcctaaggacaccctgatgatcagcagaacccctgaagtgacctgcgtggtggtggatgtgtctcacgaggacccagaagtgaagttcaattggtacgtggacggcgtggaagtgcacaacgccaagaccaagcctagagaggaacagtacaacagcacctacagagtggtgtccgtgctgacagtgctgcaccaggattggctgaacggcaaagagtacaagtgcaaggtgtccaacaaggccctgcctgctcctatcgagaaaaccatcagcaaggccaagggccagcctcgcgaacctcaagtctgtacactgcctcctagccgcgacgaactgaccaagaaccaggtgtccctgagctgcgccgtgaagggcttttacccttccgatatcgccgtggaatgggagagcaatggccagcctgagaacaactacaagacaacccctcctgtgctggacagcgacggctcattcttcctggtgtccaagctgacagtggacaagagcagatggcagcagggcaacgtgttcagctgcagcgtgctgcatgaagccctgcacagccactacacccagaagtccctgtctctgagccccggcaagtgataa

SEQ ID NO: 557 - DNA, 702 bp, synthetic construct
  source 1..702: mol_type = other DNA
gaacctaagagcagcgacaagacccacacctgtcctccatgtcctgctccagaactgctggccggaccttccgtgttcctgtttcctccaaagcctaaggacaccctgatgatcagcagaacccctgaagtgacctgcgtggtggtggatgtgtctcacgaggaccctgaagtgaagttcaattggtacgtggacggcgtggaagtgcacaacgccaagaccaagcctagagaggaacagtacaacagcacctacagagtggtgtccgtgctgaccgtgctgcaccaggattggctgaacggcaaagagtacaagtgcaaggtgtccaacaaggccctgcctctgcctgaggaaaagaccatcagcaaggccaagggccagcctcgcgaacctcaagtctgtacactgcctcctagccgcgacgaactgaccaagaaccaggtgtccctgagctgcgccgtgaagggcttttacccttccgatatcgccgtggaatgggagagcaatggccagcctgagaacaactacaagacaacccctcctgtgctggacagcgacggctcattcttcctggtgtccaagctgacagtggacaagagcagatggcagcagggcaacgtgttcagctgcagcgtgctgcatgaagccctgcacagccactacacccagaagtccctgtctctgagccccggcaagtgataa

SEQ ID NO: 558 - DNA, 702 bp, synthetic construct
  source 1..702: mol_type = other DNA
gaacctaagagcagcgacaagacccacacctgtcctccatgtcctgctccagaactgctggccggaccttccgtgttcctgtttcctccaaagcctaaggacaccctgatgatcagcagaacccctgaagtgacctgcgtggtggtggatgtgtctcacgaggaccctgaagtgaagttcaattggtacgtggacggcgtggaagtgcacaacgccaagaccaagcctagagaggaacagtacaacagcacctacagagtggtgtccgtgctgaccgtgctgcaccaggattggctgaacggcaaagagtacaagtgcaaggtgtccaacaaggccctgcctgcccctgaggaaaagaccatcagcaaggccaagggccagcctcgcgaacctcaagtctgtacactgcctcctagccgcgacgaactgaccaagaaccaggtgtccctgagctgcgccgtgaagggcttttacccttccgatatcgccgtggaatgggagagcaatggccagcctgagaacaactacaagacaacccctcctgtgctggacagcgacggctcattcttcctggtgtccaagctgacagtggacaagagcagatggcagcagggcaacgtgttcagctgcagcgtgctgcatgaagccctgcacagccactacacccagaagtccctgtctctgagccccggcaagtgataa

SEQ ID NO: 559 - DNA, 702 bp, synthetic construct
  source 1..702: mol_type = other DNA
gaacctaagagcagcgacaagacccacacctgtcctccatgtcctgctccagaactgctcggcggaccttccgtgttcctgtttcctccaaagcctaaggacaccctgatgatcagcagaacccctgaagtgacctgcgtggtggtggatgtgtctcacgaggacccagaagtgaagttcaattggtacgtggacggcgtggaagtgcacaacgccaagaccaagcctagagaggaacagtacaacagcacctacagagtggtgtccgtgctgacagtgctgcaccaggattggctgaacggcaaagagtacaagtgcaaggtgtccaacaaggccctgcctgctcctatcgagaaaaccatcagcaaggccaagggccagcctagggaaccccaggtttacaccctgcctccatgccgcgacgaactgaccaagaaccaggtgtccctgtggtgcctggtcaagggcttctacccttccgatatcgccgtggaatgggagagcaatggccagcctgagaacaactacaagacaacccctcctgtgctggacagcgacggctcattcttcctgtacagcaagctgacagtggacaagagcagatggcagcagggcaacgtgttcagctgcagcgtgctgcatgaagccctgcacagccactacacccagaagtccctgtctctgagccccggcaagtgataa

SEQ ID NO: 560 - DNA, 702 bp, synthetic construct
  source 1..702: mol_type = other DNA
gaacctaagagcagcgacaagacccacacctgtcctccatgtcctgctccagaactgctggccggaccttccgtgttcctgtttcctccaaagcctaaggacaccctgatgatcagcagaacccctgaagtgacctgcgtggtggtggatgtgtctcacgaggaccctgaagtgaagttcaattggtacgtggacggcgtggaagtgcacaacgccaagaccaagcctagagaggaacagtacaacagcacctacagagtggtgtccgtgctgaccgtgctgcaccaggattggctgaacggcaaagagtacaagtgcaaggtgtccaacaaggccctgcctctgcctgaggaaaagaccatcagcaaggccaagggccagcctagggaaccccaggtttacaccctgcctccatgccgcgacgaactgaccaagaaccaggtgtccctgtggtgcctggtcaagggcttctacccttccgatatcgccgtggaatgggagagcaatggccagcctgagaacaactacaagacaacccctcctgtgctggacagcgacggctcattcttcctgtacagcaagctgacagtggacaagagcagatggcagcagggcaacgtgttcagctgcagcgtgctgcatgaagccctgcacagccactacacccagaagtccctgtctctgagccccggcaagtgataa

SEQ ID NO: 561 - DNA, 702 bp, synthetic construct
  source 1..702: mol_type = other DNA
gaacctaagagcagcgacaagacccacacctgtcctccatgtcctgctccagaactgctggccggaccttccgtgttcctgtttcctccaaagcctaaggacaccctgatgatcagcagaacccctgaagtgacctgcgtggtggtggatgtgtctcacgaggaccctgaagtgaagttcaattggtacgtggacggcgtggaagtgcacaacgccaagaccaagcctagagaggaacagtacaacagcacctacagagtggtgtccgtgctgaccgtgctgcaccaggattggctgaacggcaaagagtacaagtgcaaggtgtccaacaaggccctgcctgcccctgaggaaaagaccatcagcaaggccaagggccagcctagggaaccccaggtttacaccctgcctccatgccgcgacgaactgaccaagaaccaggtgtccctgtggtgcctggtcaagggcttctacccttccgatatcgccgtggaatgggagagcaatggccagcctgagaacaactacaagacaacccctcctgtgctggacagcgacggctcattcttcctgtacagcaagctgacagtggacaagagcagatggcagcagggcaacgtgttcagctgcagcgtgctgcatgaagccctgcacagccactacacccagaagtccctgtctctgagccccggcaagtgataa

SEQ ID NO: 562 - DNA, 702 bp, synthetic construct
  source 1..702: mol_type = other DNA
gaacctaagagcagcgacaagacccacacctgtcctccatgtcctgctccagaactgctcggcggaccttccgtgttcctgtttcctccaaagcctaaggacaccctgatgatcagcagaacccctgaagtgacctgcgtggtggtggatgtgtctcacgaggacccagaagtgaagttcaattggtacgtggacggcgtggaagtgcacaacgccaagaccaagcctagagaggaacagtacaacagcacctacagagtggtgtccgtgctgacagtgctgcaccaggattggctgaacggcaaagagtacaagtgcaaggtgtccaacaaggccctgcctgctcctatcgagaaaaccatcagcaaggccaagggccagcctagggaaccccaggtttacacactgcctccaagccgcgaggaaatgaccaagaaccaggtgtccctgacctgcctcgtgaagggcttctacccttccgatatcgccgtggaatgggagagcaatggccagcctgagaacaactacaagacaacccctcctgtgctggacagcgacggctcattcttcctgtacagcaagctgactgtggataagtcccggtggcagcagggcaacgtgttcagctgttctgtgatgcacgaagccctgcacaaccactacacccagaaaagcctgtctctgagccccggcaagtgataa

SEQ ID NO: 563 - DNA, 702 bp, synthetic construct
  source 1..702: mol_type = other DNA
gaacctaagagcagcgacaagacccacacctgtcctccatgtcctgctccagaactgctggccggaccttccgtgttcctgtttcctccaaagcctaaggacaccctgatgatcagcagaacccctgaagtgacctgcgtggtggtggatgtgtctcacgaggaccctgaagtgaagttcaattggtacgtggacggcgtggaagtgcacaacgccaagaccaagcctagagaggaacagtacaacagcacctacagagtggtgtccgtgctgaccgtgctgcaccaggattggctgaacggcaaagagtacaagtgcaaggtgtccaacaaggccctgcctctgcctgaggaaaagaccatcagcaaggccaagggccagcctagggaaccccaggtttacacactgcctccaagccgcgaggaaatgaccaagaaccaggtgtccctgacctgcctcgtgaagggcttctacccttccgatatcgccgtggaatgggagagcaatggccagcctgagaacaactacaagacaacccctcctgtgctggacagcgacggctcattcttcctgtacagcaagctgaccgtggacaagtccagatggcagcagggcaacgtgttcagctgtagcgtgctgcacgaagccctgcacagccactacacccagaaaagcctgtctctgagccccggcaaatgataa

SEQ ID NO: 564 - DNA, 702 bp, synthetic construct
  source 1..702: mol_type = other DNA
gaacctaagagcagcgacaagacccacacctgtcctccatgtcctgctccagaactgctggccggaccttccgtgttcctgtttcctccaaagcctaaggacaccctgatgatcagcagaacccctgaagtgacctgcgtggtggtggatgtgtctcacgaggaccctgaagtgaagttcaattggtacgtggacggcgtggaagtgcacaacgccaagaccaagcctagagaggaacagtacaacagcacctacagagtggtgtccgtgctgaccgtgctgcaccaggattggctgaacggcaaagagtacaagtgcaaggtgtccaacaaggccctgcctgcccctgaggaaaagaccatcagcaaggccaagggccagcctagggaaccccaggtttacacactgcctccaagccgcgaggaaatgaccaagaaccaggtgtccctgacctgcctcgtgaagggcttctacccttccgatatcgccgtggaatgggagagcaatggccagcctgagaacaactacaagacaacccctcctgtgctggacagcgacggctcattcttcctgtacagcaagctgaccgtggacaagtccagatggcagcagggcaacgtgttcagctgtagcgtgctgcacgaagccctgcacagccactacacccagaaaagcctgtctctgagccccggcaaatgataa

SEQ ID NO: 565 - DNA, 702 bp, synthetic construct; identical to SEQ ID NO: 562
  source 1..702: mol_type = other DNA

SEQ ID NO: 566 - DNA, 702 bp, synthetic construct
  source 1..702: mol_type = other DNA
gaacctaagagcagcgacaagacccacacctgtcctccatgtcctgctccagaactgctcggcggaccttccgtgttcctgtttcctccaaagcctaaggacaccctgatgatcagcagaacccctgaagtgacctgcgtggtggtggatgtgtctcacgaggacccagaagtgaagttcaattggtacgtggacggcgtggaagtgcacaacgccaagaccaagcctagagaggaacagtacaacagcacctacagagtggtgtccgtgctgacagtgctgcaccaggattggctgaacggcaaagagtacaagtgcaaggtgtccaacaaggccctgcctgctcctatcgagaaaaccatcagcaaggccaagggccagcctagggaaccccaggtttacacactgcctccaagccgcgaggaaatgaccaagaaccaggtgtccctgacctgcctcgtgaagggcttctacccttccgatatcgccgtggaatgggagagcaatggccagcctgagaacaactacaagacaacccctcctgtgctggacagcgacggctcattcttcctgtacagcaagctgaccgtggacaagtccagatggcagcagggcaacgtgttcagctgtagcgtgctgcacgaagccctgcacagccactacacccagaaaagcctgtctctgagccccggcaaatgataa

SEQ ID NO: 567 - DNA, 702 bp, synthetic construct; identical to SEQ ID NO: 563
  source 1..702: mol_type = other DNA

SEQ ID NO: 568 - DNA, 702 bp, synthetic construct; identical to SEQ ID NO: 564
  source 1..702: mol_type = other DNA

SEQ ID NO: 569 - DNA, 702 bp, synthetic construct
  source 1..702: mol_type = other DNA
gaacctaagagcagcgacaagacccacacctgtcctccatgtcctgctccagaactgctcggcggaccttccgtgttcctgtttcctccaaagcctaaggacaccctgatgatcagcagaacccctgaagtgacctgcgtggtggtggatgtgtctcacgaggacccagaagtgaagttcaattggtacgtggacggcgtggaagtgcacaacgccaagaccaagcctagagaggaacagtacaacagcacctacagagtggtgtccgtgctgacagtgctgcaccaggattggctgaacggcaaagagtacaagtgcaaggtgtccaacaaggccctgcctgctcctatcgagaaaaccatcagcaaggccaagggccagcctagggaaccccaggtttacacactgcctccaagccgcgacgaactgaccaagaaccaggtgtccctgacctgcctcgtgaagggcttctacccttccgatatcgccgtggaatgggagagcaatggccagcctgagaacaactacaagacaacccctcctgtgctggacagcgacggctcattcttcctgtacagcaagctgactgtggataagtcccggtggcagcagggcaacgtgttcagctgttctgtgatgcacgaagccctgcacaaccactacacccagaaaagcctgtctctgagccccggcaagtgataa

SEQ ID NO: 570 - DNA, 702 bp, synthetic construct
  source 1..702: mol_type = other DNA
gaacctaagagcagcgacaagacccacacctgtcctccatgtcctgctccagaactgctcggcggaccttccgtgttcctgtttcctccaaagcctaaggacaccctgatgatcagcagaacccctgaagtgacctgcgtggtggtggatgtgtctcacgaggacccagaagtgaagttcaattggtacgtggacggcgtggaagtgcacaacgccaagaccaagcctagagaggaacagtacaacagcacctacagagtggtgtccgtgctgacagtgctgcaccaggattggctgaacggcaaagagtacaagtgcaaggtgtccaacaaggccctgcctgctcctatcgagaaaaccatcagcaaggccaagggccagcctagggaaccccaggtttacacactgcctccaagccgcgacgaactgaccaagaaccaggtgtccctgacctgcctcgtgaagggcttctacccttccgatatcgccgtggaatgggagagcaatggccagcctgagaacaactacaagacaacccctcctgtgctggacagcgacggctcattcttcctgtacagcaagctgaccgtggacaagtccagatggcagcagggcaacgtgttcagctgtagcgtgctgcacgaagccctgcacagccactacacccagaaaagcctgtctctgagccccggcaaatgataa

SEQ ID NO: 571 - DNA, 702 bp, synthetic construct
  source 1..702: mol_type = other DNA
gaacctaagagcagcgacaagacccacacctgtcctccatgtcctgctccagaactgctggccggaccttccgtgttcctgtttcctccaaagcctaaggacaccctgatgatcagcagaacccctgaagtgacctgcgtggtggtggatgtgtctcacgaggaccctgaagtgaagttcaattggtacgtggacggcgtggaagtgcacaacgccaagaccaagcctagagaggaacagtacaacagcacctacagagtggtgtccgtgctgaccgtgctgcaccaggattggctgaacggcaaagagtacaagtgcaaggtgtccaacaaggccctgcctctgcctgaggaaaagaccatcagcaaggccaagggccagcctagggaaccccaggtttacacactgcctccaagccgcgacgaactgaccaagaaccaggtgtccctgacctgcctcgtgaagggcttctacccttccgatatcgccgtggaatgggagagcaatggccagcctgagaacaactacaagacaacccctcctgtgctggacagcgacggctcattcttcctgtacagcaagctgaccgtggacaagtccagatggcagcagggcaacgtgttcagctgtagcgtgctgcacgaagccctgcacagccactacacccagaaaagcctgtctctgagccccggcaaatgataa

SEQ ID NO: 572 - DNA, 702 bp, synthetic construct
  source 1..702: mol_type = other DNA
gaacctaagagcagcgacaagacccacacctgtcctccatgtcctgctccagaactgctggccggaccttccgtgttcctgtttcctccaaagcctaaggacaccctgatgatcagcagaacccctgaagtgacctgcgtggtggtggatgtgtctcacgaggaccctgaagtgaagttcaattggtacgtggacggcgtggaagtgcacaacgccaagaccaagcctagagaggaacagtacaacagcacctacagagtggtgtccgtgctgaccgtgctgcaccaggattggctgaacggcaaagagtacaagtgcaaggtgtccaacaaggccctgcctgcccctgaggaaaagaccatcagcaaggccaagggccagcctagggaaccccaggtttacacactgcctccaagccgcgacgaactgaccaagaaccaggtgtccctgacctgcctcgtgaagggcttctacccttccgatatcgccgtggaatgggagagcaatggccagcctgagaacaactacaagacaacccctcctgtgctggacagcgacggctcattcttcctgtacagcaagctgaccgtggacaagtccagatggcagcagggcaacgtgttcagctgtagcgtgctgcacgaagccctgcacagccactacacccagaaaagcctgtctctgagccccggcaaatgataa

SEQ ID NO: 573 - DNA, 321 bp, synthetic construct; identical to SEQ ID NO: 49
  source 1..321: mol_type = other DNA

SEQ ID NO: 574 - DNA, 687 bp, synthetic construct
  source 1..687: mol_type = other DNA
gataagacccacacctgtcctccatgtccagctccagaactgctcggcggaccttccgtgttcctgtttcctccaaagcctaaggacaccctgatgatcagcagaacccctgaagtgacctgcgtggtggtggatgtgtctcacgaggacccagaagtgaagttcaattggtacgtggacggcgtggaagtgcacaacgccaagaccaagcctagagaggaacagtacaacagcacctacagagtggtgtccgtgctgacagtgctgcaccaggattggctgaacggcaaagagtacaagtgcaaggtgtccaacaaggccctgcctgctcctatcgagaaaaccatcagcaaggccaagggccagcctagggaaccccaggtttacacactgcctccaagccgcgaggaaatgaccaagaaccaggtgtccctgacctgcctcgtgaagggcttctacccttccgatatcgccgtggaatgggagagcaatggccagcctgagaacaactacaagacaacccctcctgtgctggacagcgacggctcattcttcctgtacagcaagctgactgtggataagtcccggtggcagcagggcaacgtgttcagctgttctgtgatgcacgaagccctgcacaaccactacacccagaaaagcctgtctctgagccccggcaagtgataa

SEQ ID NO: 575 - DNA, 687 bp, synthetic construct; identical to SEQ ID NO: 574
  source 1..687: mol_type = other DNA

SEQ ID NO: 576 - DNA, 687 bp, synthetic construct
  source 1..687: mol_type = other DNA
gataagacccacacctgtcctccatgtccagctccagaactgctcggcggaccttccgtgttcctgtttcctccaaagcctaaggacaccctgatgatcagcagaacccctgaagtgacctgcgtggtggtggatgtgtctcacgaggacccagaagtgaagttcaattggtacgtggacggcgtggaagtgcacaacgccaagaccaagcctagagaggaacagtacaacagcacctacagagtggtgtccgtgctgacagtgctgcaccaggattggctgaacggcaaagagtacaagtgcaaggtgtccaacaaggccctgcctgctcctatcgagaaaaccatcagcaaggccaagggccagcctagggaaccccaggtttacacactgcctccaagccgcgaggaaatgaccaagaaccaggtgtccctgacctgcctcgtgaagggcttctacccttccgatatcgccgtggaatgggagagcaatggccagcctgagaacaactacaagacaacccctcctgtgctggacagcgacggctcattcttcctgtacagcaagctgaccgtggacaagtccagatggcagcagggcaacgtgttcagctgtagcgtgctgcacgaagccctgcacagccactacacccagaaaagcctgtctctgagccccggcaaatgataa

SEQ ID NO: 577 - DNA, 687 bp, synthetic construct
  source 1..687: mol_type = other DNA
gataagacccacacctgtcctccatgtccagctccagaactgctcggcggaccttccgtgttcctgtttcctccaaagcctaaggacaccctgatgatcagcagaacccctgaagtgacctgcgtggtggtggatgtgtctcacgaggacccagaagtgaagttcaattggtacgtggacggcgtggaagtgcacaacgccaagaccaagcctagagaggaacagtacaacagcacctacagagtggtgtccgtgctgacagtgctgcaccaggattggctgaacggcaaagagtacaagtgcaaggtgtccaacaaggccctgcctgctcctatcgagaaaaccatcagcaaggccaagggccagcctagggaaccccaggtttacacactgcctccaagccgcgacgaactgaccaagaaccaggtgtccctgacctgcctcgtgaagggcttctacccttccgatatcgccgtggaatgggagagcaatggccagcctgagaacaactacaagacaacccctcctgtgctggacagcgacggctcattcttcctgtacagcaagctgactgtggataagtcccggtggcagcagggcaacgtgttcagctgttctgtgatgcacgaagccctgcacaaccactacacccagaaaagcctgtctctgagccccggcaagtgataa

SEQ ID NO: 578 - DNA, 687 bp, synthetic construct
  source 1..687: mol_type = other DNA
gataagacccacacctgtcctccatgtccagctccagaactgctcggcggaccttccgtgttcctgtttcctccaaagcctaaggacaccctgatgatcagcagaacccctgaagtgacctgcgtggtggtggatgtgtctcacgaggacccagaagtgaagttcaattggtacgtggacggcgtggaagtgcacaacgccaagaccaagcctagagaggaacagtacaacagcacctacagagtggtgtccgtgctgacagtgctgcaccaggattggctgaacggcaaagagtacaagtgcaaggtgtccaacaaggccctgcctgctcctatcgagaaaaccatcagcaaggccaagggccagcctagggaaccccaggtttacacactgcctccaagccgcgacgaactgaccaagaaccaggtgtccctgacctgcctcgtgaagggcttctacccttccgatatcgccgtggaatgggagagcaatggccagcctgagaacaactacaagacaacccctcctgtgctggacagcgacggctcattcttcctgtacagcaagctgaccgtggacaagtccagatggcagcagggcaacgtgttcagctgtagcgtgctgcacgaagccctgcacagccactacacccagaaaagcctgtctctgagccccggcaaatgataa

SEQ ID NO: 579 - DNA, 321 bp, synthetic construct; identical to SEQ ID NO: 49
  source 1..321: mol_type = other DNA

SEQ ID NO: 580 - DNA, 687 bp, synthetic construct; identical to SEQ ID NO: 574
  source 1..687: mol_type = other DNA

SEQ ID NO: 581 - DNA, 687 bp, synthetic construct; identical to SEQ ID NO: 574
  source 1..687: mol_type = other DNA

SEQ ID NO: 582 - DNA, 687 bp, synthetic construct; identical to SEQ ID NO: 576
  source 1..687: mol_type = other DNA

SEQ ID NO: 583 - DNA, 687 bp, synthetic construct; identical to SEQ ID NO: 577
  source 1..687: mol_type = other DNA

SEQ ID NO: 584 - DNA, 687 bp, synthetic construct; identical to SEQ ID NO: 578
  source 1..687: mol_type = other DNA

SEQ ID NO: 585 - DNA, 294 bp, synthetic construct
  source 1..294: mol_type = other DNA
gcttccacaaagggccctagcgtgttccctctggctcctagcagcaagtctacaagcggaggaacagctgccctgggctgcctggtggaagattactttcctgagcctgtgaccgtgtcctggaacagcggtgctctgacttctggcgtgcacacctttccagccgtgctgcaaagcagcggcctgtactctctgagcagcgtggtcacagtgccaagctctagcctgggcacccagacctacatctgcaatgtgaaccacaagcctagcaacaccaaggtggacgacaaggtg

SEQ ID NO: 586 - DNA, 294 bp, synthetic construct; identical to SEQ ID NO: 585
  source 1..294: mol_type = other DNA

SEQ ID NO: 587 - DNA, 702 bp, synthetic construct
  source 1..702: mol_type = other DNA
gaacccaagagctgcgacaagacccacacctgtcctccatgtcctgctccagaactgctcggcggaccttccgtgttcctgtttcctccaaagcctaaggacaccctgatgatcagcagaacccctgaagtgacctgcgtggtggtggatgtgtctcacgaggacccagaagtgaagttcaattggtacgtggacggcgtggaagtgcacaacgccaagaccaagcctagagaggaacagtacaacagcacctacagagtggtgtccgtgctgacagtgctgcaccaggattggctgaacggcaaagagtacaagtgcaaggtgtccaacaaggccctgcctgctcctatcgagaaaaccatcagcaaggccaagggccagcctagggaaccccaggtttacacactgcctccaagccgcgaggaaatgaccaagaaccaggtgtccctgacctgcctcgtgaagggcttctacccttccgatatcgccgtggaatgggagagcaatggccagcctgagaacaactacaagacaacccctcctgtgctggacagcgacggctcattcttcctgtacagcaagctgactgtggataagtcccggtggcagcagggcaacgtgttcagctgttctgtgatgcacgaagccctgcacaaccactacacccagaaaagcctgtctctgagccccggcaagtgataa

SEQ ID NO: 588 - DNA, 702 bp, synthetic construct
  source 1..702: mol_type = other DNA
gaacccaagagctgcgacaagacccacacctgtcctccatgtcctgctccagaactgctggccggaccttccgtgttcctgtttcctccaaagcctaaggacaccctgatgatcagcagaacccctgaagtgacctgcgtggtggtggatgtgtctcacgaggaccctgaagtgaagttcaattggtacgtggacggcgtggaagtgcacaacgccaagaccaagcctagagaggaacagtacaacagcacctacagagtggtgtccgtgctgaccgtgctgcaccaggattggctgaacggcaaagagtacaagtgcaaggtgtccaacaaggccctgcctgcccctgaggaaaagaccatcagcaaggccaagggccagcctagggaaccccaggtttacacactgcctccaagccgcgaggaaatgaccaagaaccaggtgtccctgacctgcctcgtgaagggcttctacccttccgatatcgccgtggaatgggagagcaatggccagcctgagaacaactacaagacaacccctcctgtgctggacagcgacggctcattcttcctgtacagcaagctgaccgtggacaagtccagatggcagcagggcaacgtgttcagctgtagcgtgctgcacgaagccctgcacagccactacacccagaaaagcctgtctctgagccccggcaaatgataa

SEQ ID NO: 589 - DNA, 702 bp, synthetic construct; identical to SEQ ID NO: 587
  source 1..702: mol_type = other DNA

SEQ ID NO: 590 - DNA, 702 bp, synthetic construct
  source 1..702: mol_type = other DNA
gaacccaagagctgcgacaagacccacacctgtcctccatgtcctgctccagaactgctcggcggaccttccgtgttcctgtttcctccaaagcctaaggacaccctgatgatcagcagaacccctgaagtgacctgcgtggtggtggatgtgtctcacgaggacccagaagtgaagttcaattggtacgtggacggcgtggaagtgcacaacgccaagaccaagcctagagaggaacagtacaacagcacctacagagtggtgtccgtgctgacagtgctgcaccaggattggctgaacggcaaagagtacaagtgcaaggtgtccaacaaggccctgcctgctcctatcgagaaaaccatcagcaaggccaagggccagcctagggaaccccaggtttacacactgcctccaagccgcgaggaaatgaccaagaaccaggtgtccctgacctgcctcgtgaagggcttctacccttccgatatcgccgtggaatgggagagcaatggccagcctgagaacaactacaagacaacccctcctgtgctggacagcgacggctcattcttcctgtacagcaagctgaccgtggacaagtccagatggcagcagggcaacgtgttcagctgtagcgtgctgcacgaagccctgcacagccactacacccagaaaagcctgtctctgagccccggcaaatgataa

SEQ ID NO: 591 - DNA, 702 bp, synthetic construct
  source 1..702: mol_type = other DNA
gaacccaagagctgcgacaagacccacacctgtcctccatgtcctgctccagaactgctggccggaccttccgtgttcctgtttcctccaaagcctaaggacaccctgatgatcagcagaacccctgaagtgacctgcgtggtggtggatgtgtctcacgaggaccctgaagtgaagttcaattggtacgtggacggcgtggaagtgcacaacgccaagaccaagcctagagaggaacagtacaacagcacctacagagtggtgtccgtgctgaccgtgctgcaccaggattggctgaacggcaaagagtacaagtgcaaggtgtccaacaaggccctgcctctgcctgaggaaaagaccatcagcaaggccaagggccagcctagggaaccccaggtttacacactgcctccaagccgcgaggaaatgaccaagaaccaggtgtccctgacctgcctcgtgaagggcttctacccttccgatatcgccgtggaatgggagagcaatggccagcctgagaacaactacaagacaacccctcctgtgctggacagcgacggctcattcttcctgtacagcaagctgaccgtggacaagtccagatggcagcagggcaacgtgttcagctgtagcgtgctgcacgaagccctgcacagccactacacccagaaaagcctgtctctgagccccggcaaatgataa

SEQ ID NO: 592 - DNA, 702 bp, synthetic construct; identical to SEQ ID NO: 588
  source 1..702: mol_type = other DNA

SEQ ID NO: 593 - DNA, 702 bp, synthetic construct
  source 1..702: mol_type = other DNA
gaacccaagagctgcgacaagacccacacctgtcctccatgtcctgctccagaactgctcggcggaccttccgtgttcctgtttcctccaaagcctaaggacaccctgatgatcagcagaacccctgaagtgacctgcgtggtggtggatgtgtctcacgaggacccagaagtgaagttcaattggtacgtggacggcgtggaagtgcacaacgccaagaccaagcctagagaggaacagtacaacagcacctacagagtggtgtccgtgctgacagtgctgcaccaggattggctgaacggcaaagagtacaagtgcaaggtgtccaacaaggccctgcctgctcctatcgagaaaaccatcagcaaggccaagggccagcctagggaaccccaggtttacacactgcctccaagccgcgacgaactgaccaagaaccaggtgtccctgacctgcctcgtgaagggcttctacccttccgatatcgccgtggaatgggagagcaatggccagcctgagaacaactacaagacaacccctcctgtgctggacagcgacggctcattcttcctgtacagcaagctgactgtggataagtcccggtggcagcagggcaacgtgttcagctgttctgtgatgcacgaagccctgcacaaccactacacccagaaaagcctgtctctgagccccggcaagtgataa

SEQ ID NO: 594 - DNA, 702 bp, synthetic construct
  source 1..702: mol_type = other DNA
gaacccaagagctgcgacaagacccacacctgtcctccatgtcctgctccagaactgctcggcggaccttccgtgttcctgtttcctccaaagcctaaggacaccctgatgatcagcagaacccctgaagtgacctgcgtggtggtggatgtgtctcacgaggacccagaagtgaagttcaattggtacgtggacggcgtggaagtgcacaacgccaagaccaagcctagagaggaacagtacaacagcacctacagagtggtgtccgtgctgacagtgctgcaccaggattggctgaacggcaaagagtacaagtgcaaggtgtccaacaaggccctgcctgctcctatcgagaaaaccatcagcaaggccaagggccagcctagggaaccccaggtttacacactgcctccaagccgcgacgaactgaccaagaaccaggtgtccctgacctgcctcgtgaagggcttctacccttccgatatcgccgtggaatgggagagcaatggccagcctgagaacaactacaagacaacccctcctgtgctggacagcgacggctcattcttcctgtacagcaagctgaccgtggacaagtccagatggcagcagggcaacgtgttcagctgtagcgtgctgcacgaagccctgcacagccactacacccagaaaagcctgtctctgagccccggcaaatgataa

SEQ ID NO: 595 - DNA, 702 bp, synthetic construct
  source 1..702: mol_type = other DNA
gaacccaagagctgcgacaagacccacacctgtcctccatgtcctgctccagaactgctggccggaccttccgtgttcctgtttcctccaaagcctaaggacaccctgatgatcagcagaacccctgaagtgacctgcgtggtggtggatgtgtctcacgaggaccctgaagtgaagttcaattggtacgtggacggcgtggaagtgcacaacgccaagaccaagcctagagaggaacagtacaacagcacctacagagtggtgtccgtgctgaccgtgctgcaccaggattggctgaacggcaaagagtacaagtgcaaggtgtccaacaaggccctgcctctgcctgaggaaaagaccatcagcaaggccaagggccagcctagggaaccccaggtttacacactgcctccaagccgcgacgaactgaccaagaaccaggtgtccctgacctgcctcgtgaagggcttctacccttccgatatcgccgtggaatgggagagcaatggccagcctgagaacaactacaagacaacccctcctgtgctggacagcgacggctcattcttcctgtacagcaagctgaccgtggacaagtccagatggcagcagggcaacgtgttcagctgtagcgtgctgcacgaagccctgcacagccactacacccagaaaagcctgtctctgagccccggcaaatgataa

SEQ ID NO: 596 - DNA, 702 bp, synthetic construct
  source 1..702: mol_type = other DNA
gaacccaagagctgcgacaagacccacacctgtcctccatgtcctgctccagaactgctggccggaccttccgtgttcctgtttcctccaaagcctaaggacaccctgatgatcagcagaacccctgaagtgacctgcgtggtggtggatgtgtctcacgaggaccctgaagtgaagttcaattggtacgtggacggcgtggaagtgcacaacgccaagaccaagcctagagaggaacagtacaacagcacctacagagtggtgtccgtgctgaccgtgctgcaccaggattggctgaacggcaaagagtacaagtgcaaggtgtccaacaaggccctgcctgcccctgaggaaaagaccatcagcaaggccaagggccagcctagggaaccccaggtttacacactgcctccaagccgcgacgaactgaccaagaaccaggtgtccctgacctgcctcgtgaagggcttctacccttccgatatcgccgtggaatgggagagcaatggccagcctgagaacaactacaagacaacccctcctgtgctggacagcgacggctcattcttcctgtacagcaagctgaccgtggacaagtccagatggcagcagggcaacgtgttcagctgtagcgtgctgcacgaagccctgcacagccactacacccagaaaagcctgtctctgagccccggcaaatgataa

SEQ ID NO: 597 - DNA, 708 bp, synthetic construct
  source 1..708: mol_type = other DNA
atggattggatttggagaatcctgttcctcgtgggcgccgctaccggagcccactccgaagttgtgctgacacagagccccgccatcctgagtgttagccctggcgatagagtgatcctgagctgcagagcctctcagggcctcgattcttctcacctggcctggtacagattcaagcggggacagatccccacactggtcatcttcggcaccagcaacagagccagaggcacccctgatagattttccggctctggcagcggagccgacttcaccctgacaatcagcagagtggaacccgaggacttcgccacctactactgccagagatacggcggcacccctatcacatttggcggcggaaccacactggacaagaaacgtacggtggccgctcctagcgtgttcatctttccacctagcgacagaaagctgaagtctggcacagcctctgtcgtgtgcctgctcaacaacttctaccccagagaagccaaggtgcagtggaaggtggacaacgccctgcagagcggcaatagccaagagagcgtgaccgagcaggacagcaaggactctacctacagcctgagcagcacactgaccctgagcaaggccgactacgagaagcacaaagtgtacgcctgcgaagtgacccaccagggcctttctagccctgtgaccaagagcttcaaccggggcgagtgctgataa

SEQ ID NO: 598 - DNA, 702 bp, synthetic construct
  source 1..702: mol_type = other DNA
gaacccaagagctgcgacaagacccacacctgtcctccatgtcctgctccagaactgctggccggaccttccgtgttcctgtttcctccaaagcctaaggacaccctgatgatcagcagaacccctgaagtgacctgcgtggtggtggatgtgtctcacgaggaccctgaagtgaagttcaattggtacgtggacggcgtggaagtgcacaacgccaagaccaagcctagagaggaacagtacaacagcacctacagagtggtgtccgtgctgaccgtgctgcaccaggattggctgaacggcaaagagtacaagtgcaaggtgtccaacaaggccctgcctgcccctgaggaaaagaccatcagcaaggccaagggccagcctcgcgaacctcaagtctgtacactgcctcctagccgcgaggaaatgaccaagaaccaggtgtccctgagctgcgccgtgaagggcttttacccttccgatatcgccgtggaatgggagagcaatggccagcctgagaacaactacaagacaacccctcctgtgctggacagcgacggctcattcttcctggtgtccaagctgacagtggacaagagcagatggcagcagggcaacgtgttcagctgcagcgtgctgcatgaagccctgcacagccactacacccagaagtccctgtctctgagccccggcaagtgataa

SEQ ID NO: 599 - DNA, 702 bp, synthetic construct
  source 1..702: mol_type = other DNA
gaacccaagagctgcgacaagacccacacctgtcctccatgtcctgctccagaactgctggccggaccttccgtgttcctgtttcctccaaagcctaaggacaccctgatgatcagcagaacccctgaagtgacctgcgtggtggtggatgtgtctcacgaggaccctgaagtgaagttcaattggtacgtggacggcgtggaagtgcacaacgccaagaccaagcctagagaggaacagtacaacagcacctacagagtggtgtccgtgctgaccgtgctgcaccaggattggctgaacggcaaagagtacaagtgcaaggtgtccaacaaggccctgcctgcccctgaggaaaagaccatcagcaaggccaagggccagcctagggaaccccaggtttacaccctgcctccatgccgcgaggaaatgaccaagaaccaggtgtccctgtggtgcctggtcaagggcttctacccttccgatatcgccgtggaatgggagagcaatggccagcctgagaacaactacaagacaacccctcctgtgctggacagcgacggctcattcttcctgtacagcaagctgacagtggacaagagcagatggcagcagggcaacgtgttcagctgcagcgtgctgcatgaagccctgcacagccactacacccagaagtccctgtctctgagccccggcaagtgataa

SEQ ID NO: 600 - DNA, 702 bp, synthetic construct
  source 1..702: mol_type = other DNA
gaacccaagagctgcgacaagacccacacctgtcctccatgtcctgctccagaactgctcggcggaccttccgtgttcctgtttcctccaaagcctaaggacaccctgatgatcagcagaacccctgaagtgacctgcgtggtggtggatgtgtctcacgaggacccagaagtgaagttcaattggtacgtggacggcgtggaagtgcacaacgccaagaccaagcctagagaggaacagtacaacagcacctacagagtggtgtccgtgctgacagtgctgcaccaggattggctgaacggcaaagagtacaagtgcaaggtgtccaacaaggccctgcctgctcctatcgagaaaaccatcagcaaggccaagggccagcctcgcgaacctcaagtctgtacactgcctcctagccgcgaggaaatgaccaagaaccaggtgtccctgagctgcgccgtgaagggcttttacccttccgatatcgccgtggaatgggagagcaatggccagcctgagaacaactacaagacaacccctcctgtgctggacagcgacggctcattcttcctggtgtccaagctgacagtggacaagagcagatggcagcagggcaacgtgttcagctgcagcgtgctgcatgaagccctgcacagccactacacccagaagtccctgtctctgagccccggcaagtgataa

SEQ ID NO: 601 - DNA, 702 bp, synthetic construct
  source 1..702: mol_type = other DNA
gaacccaagagctgcgacaagacccacacctgtcctccatgtcctgctccagaactgctggccggaccttccgtgttcctgtttcctccaaagcctaaggacaccctgatgatcagcagaacccctgaagtgacctgcgtggtggtggatgtgtctcacgaggaccctgaagtgaagttcaattggtacgtggacggcgtggaagtgcacaacgccaagaccaagcctagagaggaacagtacaacagcacctacagagtggtgtccgtgctgaccgtgctgcaccaggattggctgaacggcaaagagtacaagtgcaaggtgtccaacaaggccctgcctctgcctgaggaaaagaccatcagcaaggccaagggccagcctcgcgaacctcaagtctgtacactgcctcctagccgcgaggaaatgaccaagaaccaggtgtccctgagctgcgccgtgaagggcttttacccttccgatatcgccgtggaatgggagagcaatggccagcctgagaacaactacaagacaacccctcctgtgctggacagcgacggctcattcttcctggtgtccaagctgacagtggacaagagcagatggcagcagggcaacgtgttcagctgcagcgtgctgcatgaagccctgcacagccactacacccagaagtccctgtctctgagccccggcaagtgataa

SEQ ID NO: 602 - DNA, 702 bp, synthetic construct; identical to SEQ ID NO: 598
  source 1..702: mol_type = other DNA

SEQ ID NO: 603 - DNA, 702 bp, synthetic construct
  source 1..702: mol_type = other DNA
gaacccaagagctgcgacaagacccacacctgtcctccatgtcctgctccagaactgctcggcggaccttccgtgttcctgtttcctccaaagcctaaggacaccctgatgatcagcagaacccctgaagtgacctgcgtggtggtggatgtgtctcacgaggacccagaagtgaagttcaattggtacgtggacggcgtggaagtgcacaacgccaagaccaagcctagagaggaacagtacaacagcacctacagagtggtgtccgtgctgacagtgctgcaccaggattggctgaacggcaaagagtacaagtgcaaggtgtccaacaaggccctgcctgctcctatcgagaaaaccatcagcaaggccaagggccagcctagggaaccccaggtttacaccctgcctccatgccgcgaggaaatgaccaagaaccaggtgtccctgtggtgcctggtcaagggcttctacccttccgatatcgccgtggaatgggagagcaatggccagcctgagaacaactacaagacaacccctcctgtgctggacagcgacggctcattcttcctgtacagcaagctgacagtggacaagagcagatggcagcagggcaacgtgttcagctgcagcgtgctgcatgaagccctgcacagccactacacccagaagtccctgtctctgagccccggcaagtgataa

SEQ ID NO: 604 - DNA, 702 bp, synthetic construct
  source 1..702: mol_type = other DNA
gaacccaagagctgcgacaagacccacacctgtcctccatgtcctgctccagaactgctggccggaccttccgtgttcctgtttcctccaaagcctaaggacaccctgatgatcagcagaacccctgaagtgacctgcgtggtggtggatgtgtctcacgaggaccctgaagtgaagttcaattggtacgtggacggcgtggaagtgcacaacgccaagaccaagcctagagaggaacagtacaacagcacctacagagtggtgtccgtgctgaccgtgctgcaccaggattggctgaacggcaaagagtacaagtgcaaggtgtccaacaaggccctgcctctgcctgaggaaaagaccatcagcaaggccaagggccagcctagggaaccccaggtttacaccctgcctccatgccgcgaggaaatgaccaagaaccaggtgtccctgtggtgcctggtcaagggcttctacccttccgatatcgccgtggaatgggagagcaatggccagcctgagaacaactacaagacaacccctcctgtgctggacagcgacggctcattcttcctgtacagcaagctgacagtggacaagagcagatggcagcagggcaacgtgttcagctgcagcgtgctgcatgaagccctgcacagccactacacccagaagtccctgtctctgagccccggcaagtgataa

SEQ ID NO: 605 - DNA, 702 bp, synthetic construct; identical to SEQ ID NO: 599
  source 1..702: mol_type = other DNA

SEQ ID NO: 606 - DNA, 702 bp, synthetic construct
  source 1..702: mol_type = other DNA
gaacccaagagctgcgacaagacccacacctgtcctccatgtcctgctccagaactgctcggcggaccttccgtgttcctgtttcctccaaagcctaaggacaccctgatgatcagcagaacccctgaagtgacctgcgtggtggtggatgtgtctcacgaggacccagaagtgaagttcaattggtacgtggacggcgtggaagtgcacaacgccaagaccaagcctagagaggaacagtacaacagcacctacagagtggtgtccgtgctgacagtgctgcaccaggattggctgaacggcaaagagtacaagtgcaaggtgtccaacaaggccctgcctgctcctatcgagaaaaccatcagcaaggccaagggccagcctcgcgaacctcaagtctgtacactgcctcctagccgcgacgaactgaccaagaaccaggtgtccctgagctgcgccgtgaagggcttttacccttccgatatcgccgtggaatgggagagcaatggccagcctgagaacaactacaagacaacccctcctgtgctggacagcgacggctcattcttcctggtgtccaagctgacagtggacaagagcagatggcagcagggcaacgtgttcagctgcagcgtgctgcatgaagccctgcacagccactacacccagaagtccctgtctctgagccccggcaagtgataa

SEQ ID NO: 607 - DNA, 702 bp, synthetic construct
  source 1..702: mol_type = other DNA
gaacccaagagctgcgacaagacccacacctgtcctccatgtcctgctccagaactgctggccggaccttccgtgttcctgtttcctccaaagcctaaggacaccctgatgatcagcagaacccctgaagtgacctgcgtggtggtggatgtgtctcacgaggaccctgaagtgaagttcaattggtacgtggacggcgtggaagtgcacaacgccaagaccaagcctagagaggaacagtacaacagcacctacagagtggtgtccgtgctgaccgtgctgcaccaggattggctgaacggcaaagagtacaagtgcaaggtgtccaacaaggccctgcctctgcctgaggaaaagaccatcagcaaggccaagggccagcctcgcgaacctcaagtctgtacactgcctcctagccgcgacgaactgaccaagaaccaggtgtccctgagctgcgccgtgaagggcttttacccttccgatatcgccgtggaatgggagagcaatggccagcctgagaacaactacaagacaacccctcctgtgctggacagcgacggctcattcttcctggtgtccaagctgacagtggacaagagcagatggcagcagggcaacgtgttcagctgcagcgtgctgcatgaagccctgcacagccactacacccagaagtccctgtctctgagccccggcaagtgataa

SEQ ID NO: 608 - DNA, 702 bp, synthetic construct
  source 1..702: mol_type = other DNA
gaacccaagagctgcgacaagacccacacctgtcctccatgtcctgctccagaactgctggccggaccttccgtgttcctgtttcctccaaagcctaaggacaccctgatgatcagcagaacccctgaagtgacctgcgtggtggtggatgtgtctcacgaggaccctgaagtgaagttcaattggtacgtggacggcgtggaagtgcacaacgccaagaccaagcctagagaggaacagtacaacagcacctacagagtggtgtccgtgctgaccgtgctgcaccaggattggctgaacggcaaagagtacaagtgcaaggtgtccaacaaggccctgcctgcccctgaggaaaagaccatcagcaaggccaagggccagcctcgcgaacctcaagtctgtacactgcctcctagccgcgacgaactgaccaagaaccaggtgtccctgagctgcgccgtgaagggcttttacccttccgatatcgccgtggaatgggagagcaatggccagcctgagaacaactacaagacaacccctcctgtgctggacagcgacggctcattcttcctggtgtccaagctgacagtggacaagagcagatggcagcagggcaacgtgttcagctgcagcgtgctgcatgaagccctgcacagccactacacccagaagtccctgtctctgagccccggcaagtgataa

SEQ ID NO: 609 - DNA, 702 bp, synthetic construct
  source 1..702: mol_type = other DNA
gaacccaagagctgcgacaagacccacacctgtcctccatgtcctgctccagaactgctcggcggaccttccgtgttcctgtttcctccaaagcctaaggacaccctgatgatcagcagaacccctgaagtgacctgcgtggtggtggatgtgtctcacgaggacccagaagtgaagttcaattggtacgtggacggcgtggaagtgcacaacgccaagaccaagcctagagaggaacagtacaacagcacctacagagtggtgtccgtgctgacagtgctgcaccaggattggctgaacggcaaagagtacaagtgcaaggtgtccaacaaggccctgcctgctcctatcgagaaaaccatcagcaaggccaagggccagcctagggaaccccaggtttacaccctgcctccatgccgcgacgaactgaccaagaaccaggtgtccctgtggtgcctggtcaagggcttctacccttccgatatcgccgtggaatgggagagcaatggccagcctgagaacaactacaagacaacccctcctgtgctggacagcgacggctcattcttcctgtacagcaagctgacagtggacaagagcagatggcagcagggcaacgtgttcagctgcagcgtgctgcatgaagccctgcacagccactacacccagaagtccctgtctctgagccccggcaagtgataa

SEQ ID NO: 610 - DNA, 702 bp, synthetic construct
  source 1..702: mol_type = other DNA
gaacccaagagctgcgacaagacccacacctgtcctccatgtcctgctccagaactgctggccggaccttccgtgttcctgtttcctccaaagcctaaggacaccctgatgatcagcagaacccctgaagtgacctgcgtggtggtggatgtgtctcacgaggaccctgaagtgaagttcaattggtacgtggacggcgtggaagtgcacaacgccaagaccaagcctagagaggaacagtacaacagcacctacagagtggtgtccgtgctgaccgtgctgcaccaggattggctgaacggcaaagagtacaagtgcaaggtgtccaacaaggccctgcctctgcctgaggaaaagaccatcagcaaggccaagggccagcctagggaaccccaggtttacaccctgcctccatgccgcgacgaactgaccaagaaccaggtgtccctgtggtgcctggtcaagggcttctacccttccgatatcgccgtggaatgggagagcaatggccagcctgagaacaactacaagacaacccctcctgtgctggacagcgacggctcattcttcctgtacagcaagctgacagtggacaagagcagatggcagcagggcaacgtgttcagctgcagcgtgctgcatgaagccctgcacagccactacacccagaagtccctgtctctgagccccggcaagtgataa

SEQ ID NO: 611 - DNA, 702 bp, synthetic construct
  source 1..702: mol_type = other DNA
gaacccaagagctgcgacaagacccacacctgtcctccatgtcctgctccagaactgctggccggaccttccgtgttcctgtttcctccaaagcctaaggacaccctgatgatcagcagaacccctgaagtgacctgcgtggtggtggatgtgtctcacgaggaccctgaagtgaagttcaattggtacgtggacggcgtggaagtgcacaacgccaagaccaagcctagagaggaacagtacaacagcacctacagagtggtgtccgtgctgaccgtgctgcaccaggattggctgaacggcaaagagtacaagtgcaaggtgtccaacaaggccctgcctgcccctgaggaaaagaccatcagcaaggccaagggccagcctagggaaccccaggtttacaccctgcctccatgccgcgacgaactgaccaagaaccaggtgtccctgtggtgcctggtcaagggcttctacccttccgatatcgccgtggaatgggagagcaatggccagcctgagaacaactacaagacaacccctcctgtgctggacagcgacggctcattcttcctgtacagcaagctgacagtggacaagagcagatggcagcagggcaacgtgttcagctgcagcgtgctgcatgaagccctgcacagccactacacccagaagtccctgtctctgagccccggcaagtgataa

SEQ ID NO: 612 - DNA, 1446 bp, synthetic construct
  source 1..1446: mol_type = other DNA
atggactggatctggcgcatcctgtttcttgtgggagccgccacaggcgcccattctcagggcagactgtttcagtctggcgccgaagtgaaaagaccaggcgcctctgtgcggatcagctgcagagctgacgacgacccctacaccgacgacgataccttcaccaagtactggacccactggatcagacaggcccctggacaaagacctgagtggctgggagtgatcagccctcacttcgccagacctatctacagctacaagttccgggacagactgaccctgaccagagacagctctctgaccgccgtgtacctggaactgaagggcctgcagcctgacgacagcggcatctacttttgcgccagagatcccttcggcgacagagcccctcactacaactaccacatggacgtgtggggcggaggcacagccgtgatagttagcagcgcctctacaaagggccctagcgtgttccctctggctcctagcagcaagtcgacatctggcggaacagccgctctgggctgtctggtcaaggactactttcccgagcctgtgacagtgtcctggaactctggcgctctgacaagcggcgtgcacacatttccagccgtgctgcaaagcagcggcctgtactctctgagcagcgtggtcacagtgccaagctctagcctgggcacccagacctacatctgcaatgtgaaccacaagcctagcaacaccaaggtggacaagcgcgtggaacccaagagctgcgacaagacccacacctgtcctccatgtcctgctccagaactgctcggcggaccttccgtgttcctgtttcctccaaagcctaaggacaccctgatgatcagcagaacccctgaagtgacctgcgtggtggtggatgtgtctcacgaggaccccgaagtgaagttcaattggtacgtggacggcgtggaagtgcacaacgccaagaccaagcctagagaggaacagtacaacagcacctacagagtggtgtccgtgctgacagtgctgcaccaggattggctgaacggcaaagagtacaagtgcaaggtgtccaacaaggccctgcctgctcctatcgagaaaaccatcagcaaggccaagggccagcctagggaaccccaggtttacacactgcctccaagccgcgaggaaatgaccaagaaccaggtgtccctgacctgcctcgtgaagggcttctacccttccgatatcgccgtggaatgggagagcaatggccagcctgagaacaactacaagacaacccctcctgtgctggacagcgacggctcattcttcctgtacagcaagctgactgtggataagtcccggtggcagcagggcaacgtgttcagctgttctgtgatgcacgaagccctgcacaaccactacacccagaaaagcctgtctctgagccccggcaagtgataa

SEQ ID NO: 613 - RNA, 1446 nt, synthetic construct
  source 1..1446: mol_type = other RNA
atggactggatctggcgcatcctgtttcttgtgggagccgccacaggcgcccattctcagggcagactgtttcagtctggcgccgaagtgaaaagaccaggcgcctctgtgcggatcagctgcagagctgacgacgacccctacaccgacgacgataccttcaccaagtactggacccactggatcagacaggcccctggacaaagacctgagtggctgggagtgatcagccctcacttcgccagacctatctacagctacaagttccgggacagactgaccctgaccagagacagctctctgaccgccgtgtacctggaactgaagggcctgcagcctgacgacagcggcatctacttttgcgccagagatcccttcggcgacagagcccctcactacaactaccacatggacgtgtggggcggaggcacagccgtgatagttagcagcgcctctacaaagggccctagcgtgttccctctggctcctagcagcaagtcgacatctggcggaacagccgctctgggctgtctggtcaaggactactttcccgagcctgtgacagtgtcctggaactctggcgctctgacaagcggcgtgcacacatttccagccgtgctgcaaagcagcggcctgtactctctgagcagcgtggtcacagtgccaagctctagcctgggcacccagacctacatctgcaatgtgaaccacaagcctagcaacaccaaggtggacaagcgcgtggaacccaagagctgcgacaagacccacacctgtcctccatgtcctgctccagaactgctcggcggaccttccgtgttcctgtttcctccaaagcctaaggacaccctgatgatcagcagaacccctgaagtgacctgcgtggtggtggatgtgtctcacgaggaccccgaagtgaagttcaattggtacgtggacggcgtggaagtgcacaacgccaagaccaagcctagagaggaacagtacaacagcacctacagagtggtgtccgtgctgacagtgctgcaccaggattggctgaacggcaaagagtacaagtgcaaggtgtccaacaaggccctgcctgctcctatcgagaaaaccatcagcaaggccaagggccagcctagggaaccccaggtttacacactgcctccaagccgcgaggaaatgaccaagaaccaggtgtccctgacctgcctcgtgaagggcttctacccttccgatatcgccgtggaatgggagagcaatggccagcctgagaacaactacaagacaacccctcctgtgctggacagcgacggctcattcttcctgtacagcaagctgactgtggataagtcccggtggcagcagggcaacgtgttcagctgttctgtgatgcacgaagccctgcacaaccactacacccagaaaagcctgtctctgagccccggcaagtgataa

SEQ ID NO: 614 - protein, 480 aa, synthetic construct
MDWIWRILFLVGAATGAHSQGRLFQSGAEVKRPGASVRISCRADDDPYTDDDTFTKYWTHWIRQAPGQRPEWLGVISPHFARPIYSYKFRDRLTLTRDSSLTAVYLELKGLQPDDSGIYFCARDPFGDRAPHYNYHMDVWGGGTAVIVSSASTKGPSVFPLAPSSKSTSGGTAALGCLVKDYFPEPVTVSWNSGALTSGVHTFPAVLQSSGLYSLSSVVTVPSSSLGTQTYICNVNHKPSNTKVDKRVEPKSCDKTHTCPPCPAPELLGGPSVFLFPPKPKDTLMISRTPEVTCVVVDVSHEDPEVKFNWYVDGVEVHNAKTKPREEQYNSTYRVVSVLTVLHQDWLNGKEYKCKVSNKALPAPIEKTISKAKGQPREPQVYTLPPSREEMTKNQVSLTCLVKGFYPSDIAVEWESNGQPENNYKTTPPVLDSDGSFFLYSKLTVDKSRWQQGNVFSCSVMHEALHNHYTQKSLSLSPGK

SEQ ID NO: 615 - DNA, 1446 bp, synthetic construct
  source 1..1446: mol_type = other DNA
atggactggatctggcgcatcctgtttcttgtgggagccgccacaggcgcccattctcagggcagactgtttcagtctggcgccgaagtgaaaagaccaggcgcctctgtgcggatcagctgcagagctgacgacgacccctacaccgacgacgataccttcaccaagtactggacccactggatcagacaggcccctggacaaagacctgagtggctgggagtgatcagccctcacttcgccagacctatctacagctacaagttccgggacagactgaccctgaccagagacagctctctgaccgccgtgtacctggaactgaagggcctgcagcctgacgacagcggcatctacttttgcgccagagatcccttcggcgacagagcccctcactacaactaccacatggacgtgtggggcggaggcacagccgtgatcgtttctagcgcctccacaaagggccctagcgtgttccctctggctcctagcagcaagtctacaagcggaggaacagctgccctgggctgcctggtcaaggattactttcctgagcctgtgaccgtgtcttggaactctggcgctctgacaagcggcgtgcacacatttccagccgtgctgcaaagcagcggcctgtactctctgagcagcgtggtcacagtgccaagctctagcctgggcacccagacctacatctgcaatgtgaaccacaagcctagcaacaccaaggtggacaagagagtggaacccaagagctgcgacaagacccacacctgtcctccatgtcctgctccagaactgctcggcggaccttccgtgttcctgtttcctccaaagcctaaggacaccctgatgatcagcagaacccctgaagtgacctgcgtggtggtggatgtgtctcacgaggacccagaagtgaagttcaattggtacgtggacggcgtggaagtgcacaacgccaagaccaagcctagagaggaacagtacaacagcacctacagagtggtgtccgtgctgacagtgctgcaccaggattggctgaacggcaaagagtacaagtgcaaggtgtccaacaaggccctgcctgctcctatcgagaaaaccatcagcaaggccaagggccagcctagggaaccccaggtttacacactgcctccaagccgcgaggaaatgaccaagaaccaggtgtccctgacctgcctcgtgaagggcttctacccttccgatatcgccgtggaatgggagagcaatggccagcctgagaacaactacaagacaacccctcctgtgctggacagcgacggctcattcttcctgtacagcaagctgaccgtggacaagtccagatggcagcagggcaacgtgttcagctgtagcgtgctgcacgaagccctgcacagccactacacccagaaaagcctgtctctgagccccggcaaatgataa

SEQ ID NO: 616 - RNA, 2892 nt, synthetic construct
  source 1..2892: mol_type = other RNA
atggactggatctggcgcatcctgtttcttgtgggagccgccacaggcgcccattctcagggcagactgtttcagtctggcgccgaagtgaaaagaccaggcgcctctgtgcggatcagctgcagagctgacgacgacccctacaccgacgacgataccttcaccaagtactggacccactggatcagacaggcccctggacaaagacctgagtggctgggagtgatcagccctcacttcgccagacctatctacagctacaagttccgggacagactgaccctgaccagagacagctctctgaccgccgtgtacctggaactgaagggcctgcagcctgacgacagcggcatctacttttgcgccagagatcccttcggcgacagagcccctcactacaactaccacatggacgtgtggggcggaggcacagccgtgatcgtttctagcgcctccacaaagggccctagcgtgttccctctggctcctagcagcaagtctacaagcggaggaacagctgccctgggctgcctggtcaaggattactttcctgagcctgtgaccgtgtcttggaactctggcgctctgacaagcggcgtgcacacatttccagccgtgctgcaaagcagcggcctgtactctctgagcagcgtggtcacagtgccaagctctagcctgggcacccagacctacatctgcaatgtgaaccacaagcctagcaacaccaaggtggacaagagagtggaacccaagagctgcgacaagacccacacctgtcctccatgtcctgctccagaactgctcggcggaccttccgtgttcctgtttcctccaaagcctaaggacaccctgatgatcagcagaacccctgaagtgacctgcgtggtggtggatgtgtctcacgaggacccagaagtgaagttcaattggtacgtggacggcgtggaagtgcacaacgccaagaccaagcctagagaggaacagtacaacagcacctacagagtggtgtccgtgctgacagtgctgcaccaggattggctgaacggcaaagagtacaagtgcaaggtgtccaacaaggccctgcctgctcctatcgagaaaaccatcagcaaggccaagggccagcctagggaaccccaggtttacacactgcctccaagccgcgaggaaatgaccaagaaccaggtgtccctgacctgcctcgtgaagggcttctacccttccgatatcgccgtggaatgggagagcaatggccagcctgagaacaactacaagacaacccctcctgtgctggacagcgacggctcattcttcctgtacagcaagctgaccgtggacaagtccagatggcagcagggcaacgtgttcagctgtagcgtgctgcacgaagccctgcacagccactacacccagaaaagcctgtctctgagccccggcaaatgataaatggactggatctggcgcatcctgtttcttgtgggagccgccacaggcgcccattctcagggcagactgtttcagtctggcgccgaagtgaaaagaccaggcgcctctgtgcggatcagctgcagagctgacgacgacccctacaccgacgacgataccttcaccaagtactggacccactggatcagacaggcccctggacaaagacctgagtggctgggagtgatcagccctcacttcgccagacctatctacagctacaagttccgggacagactgaccctgaccagagacagctctctgaccgccgtgtacctggaactgaagggcctgcagcctgacgacagcggcatctacttttgcgccagagatcccttcggcgacagagcccctcactacaactaccacatggacgtgtggggcggaggcacagccgtgatcgtttctagcgcctccacaaagggccctagcgtgttccctctggctcctagcagcaagtctacaagcggaggaacagctgccctgggctgcctggtcaaggattactttcctgagcctgtgaccgtgtcttggaactctggcgctctgacaagcggcgtgcacacatttccagccgtgctgcaaagcagcggcctgtactctctgagcagcgtggtcacagtgccaagctctagcctgggcacccagacctacatctgcaatgtgaaccacaagcctagcaacaccaaggtggacaagagagtggaacccaagagctgcgacaagacccacacctgtcctccatgtcctgctccagaactgctcggcggaccttccgtgttcctgtttcctccaaagcctaaggacaccctgatgatcagcagaacccctgaagtgacctgcgtggtggtggatgtgtctcacgaggacccagaagtgaagttcaattggtacgtggacggcgtggaagtgcacaacgccaagaccaagcctagagaggaacagtacaacagcacctacagagtggtgtccgtgctgacagtgctgcaccaggattggctgaacggcaaagagtacaagtgcaaggtgtccaacaaggccctgcctgctcctatcgagaaaaccatcagcaaggccaagggccagcctagggaaccccaggtttacacactgcctccaagccgcgaggaaatgaccaagaaccaggtgtccctgacctgcctcgtgaagggcttctacccttccgatatcgccgtggaatgggagagcaatggccagcctgagaacaactacaagacaacccctcctgtgctggacagcgacggctcattcttcctgtacagcaagctgaccgtggacaagtccagatggcagcagggcaacgtgttcagctgtagcgtgctgcacgaagccctgcacagccactacacccagaaaagcctgtctctgagccccggcaaatgataa

SEQ ID NO: 617 - protein, 480 aa, synthetic construct
MDWIWRILFLVGAATGAHSQGRLFQSGAEVKRPGASVRISCRADDDPYTDDDTFTKYWTHWIRQAPGQRPEWLGVISPHFARPIYSYKFRDRLTLTRDSSLTAVYLELKGLQPDDSGIYFCARDPFGDRAPHYNYHMDVWGGGTAVIVSSASTKGPSVFPLAPSSKSTSGGTAALGCLVKDYFPEPVTVSWNSGALTSGVHTFPAVLQSSGLYSLSSVVTVPSSSLGTQTYICNVNHKPSNTKVDKRVEPKSCDKTHTCPPCPAPELLGGPSVFLFPPKPKDTLMISRTPEVTCVVVDVSHEDPEVKFNWYVDGVEVHNAKTKPREEQYNSTYRVVSVLTVLHQDWLNGKEYKCKVSNKALPAPIEKTISKAKGQPREPQVYTLPPSREEMTKNQVSLTCLVKGFYPSDIAVEWESNGQPENNYKTTPPVLDSDGSFFLYSKLTVDKSRWQQGNVFSCSVLHEALHSHYTQKSLSLSPGK

SEQ ID NO: 618 - DNA, 708 bp, synthetic construct
  source 1..708: mol_type = other DNA
atggactggatctggcgcatcctgtttcttgtgggagccgccacaggcgcccattctgaagttgtgctgacacagagccccgccatcctgagtgttagccctggcgatagagtgatcctgagctgcagagcctctcagggcctcgattcttctcacctggcctggtacagattcaagcggggacagatccccacactggtcatcttcggcaccagcaacagagccagaggcacccctgatagattttccggctctggcagcggagccgacttcaccctgacaatcagcagagtggaacccgaggacttcgccacctactactgccagagatacggcggcacccctatcacatttggcggcggaaccacactggacaagaaacgtacggtggccgctcctagcgtgttcatctttccacctagcgacgagcagctgaagtctggcacagcctctgtcgtgtgcctgctcaacaacttctaccccagagaagccaaggtgcagtggaaggtggacaacgccctgcagagcggcaatagccaagagagcgtgaccgagcaggacagcaaggactctacctacagcctgagcagcacactgaccctgagcaaggccgactacgagaagcacaaagtgtacgcctgcgaagtgacccaccagggcctttctagccctgtgaccaagagcttcaaccggggcgagtgctgataa

SEQ ID NO: 619 - RNA, 708 nt, synthetic construct
  source 1..708: mol_type = other RNA
atggactggatctggcgcatcctgtttcttgtgggagccgccacaggcgcccattctgaagttgtgctgacacagagccccgccatcctgagtgttagccctggcgatagagtgatcctgagctgcagagcctctcagggcctcgattcttctcacctggcctggtacagattcaagcggggacagatccccacactggtcatcttcggcaccagcaacagagccagaggcacccctgatagattttccggctctggcagcggagccgacttcaccctgacaatcagcagagtggaacccgaggacttcgccacctactactgccagagatacggcggcacccctatcacatttggcggcggaaccacactggacaagaaacgtacggtggccgctcctagcgtgttcatctttccacctagcgacgagcagctgaagtctggcacagcctctgtcgtgtgcctgctcaacaacttctaccccagagaagccaaggtgcagtggaaggtggacaacgccctgcagagcggcaatagccaagagagcgtgaccgagcaggacagcaaggactctacctacagcctgagcagcacactgaccctgagcaaggccgactacgagaagcacaaagtgtacgcctgcgaagtgacccaccagggcctttctagccctgtgaccaagagcttcaaccggggcgagtgctgataa

SEQ ID NO: 620 - protein, 234 aa, synthetic construct
MDWIWRILFLVGAATGAHSEVVLTQSPAILSVSPGDRVILSCRASQGLDSSHLAWYRFKRGQIPTLVIFGTSNRARGTPDRFSGSGSGADFTLTISRVEPEDFATYYCQRYGGTPITFGGGTTLDKKRTVAAPSVFIFPPSDEQLKSGTASVVCLLNNFYPREAKVQWKVDNALQSGNSQESVTEQDSKDSTYSLSSTLTLSKADYEKHKVYACEVTHQGLSSPVTKSFNRGEC

SEQ ID NO: 621 - DNA, 1446 bp, synthetic construct
  source 1..1446: mol_type = other DNA
atggactggatctggcgcatcctgtttcttgtgggagccgccacaggcgcccattctcagggcagactgtttcagtctggcgccgaagtgaaaagaccaggcgcctctgtgcggatcagctgcagagctgacgacgacccctacaccgacgacgataccttcaccaagtactggacccactggatcagacaggcccctggacaaagacctgagtggctgggagtgatcagccctcacttcgccagacctatctacagctacaagttccgggacagactgaccctgaccagagacagctctctgaccgccgtgtacctggaactgaagggcctgcagcctgacgacagcggcatctacttttgcgccagagatcccttcggcgacagagcccctcactacaactaccacatggacgtgtggggcggaggcacagccgtgatcgtttctagcgcctccacaaagggccctagcgtgttcccactggctcctagcagcaagtctacaagcggaggaacagccgctctgggctgcctggtcaaggattactttcccgagcctgtgaccgtgtcctggaattctggcgctctgacaagcggcgtgcacacctttccagctgtgctgcaaagcagcggcctgtactctctgagcagcgtggtcacagtgccaagctctagcctgggcacccagacctacatctgcaatgtgaaccacaagcctagcaacaccaaggtggacaagagagtggaacccaagagctgcgacaagacccacacctgtcctccatgtcctgctccagaactgctggccggaccttccgtgttcctgtttcctccaaagcctaaggacaccctgatgatcagcagaacccctgaagtgacctgcgtggtggtggatgtgtctcacgaggaccctgaagtgaagttcaattggtacgtggacggcgtggaagtgcacaacgccaagaccaagcctagagaggaacagtacaacagcacctacagagtggtgtccgtgctgaccgtgctgcaccaggattggctgaacggcaaagagtacaagtgcaaggtgtccaacaaggccctgcctctgcctgaggaaaagaccatcagcaaggccaagggccagcctagggaaccccaggtttacacactgcctccaagccgcgaggaaatgaccaagaaccaggtgtccctgacctgcctcgtgaagggcttctacccttccgatatcgccgtggaatgggagagcaatggccagcctgagaacaactacaagacaacccctcctgtgctggacagcgacggctcattcttcctgtacagcaagctgaccgtggacaagtccagatggcagcagggcaacgtgttcagctgtagcgtgctgcacgaagccctgcacagccactacacccagaaaagcctgtctctgagccccggcaaatgataa

SEQ ID NO: 622 - RNA, 1446 nt, synthetic construct
  source 1..1446: mol_type = other RNA
atggactggatctggcgcatcctgtttcttgtgggagccgccacaggcgcccattctcagggcagactgtttcagtctggcgccgaagtgaaaagaccaggcgcctctgtgcggatcagctgcagagctgacgacgacccctacaccgacgacgataccttcaccaagtactggacccactggatcagacaggcccctggacaaagacctgagtggctgggagtgatcagccctcacttcgccagacctatctacagctacaagttccgggacagactgaccctgaccagagacagctctctgaccgccgtgtacctggaactgaagggcctgcagcctgacgacagcggcatctacttttgcgccagagatcccttcggcgacagagcccctcactacaactaccacatggacgtgtggggcggaggcacagccgtgatcgtttctagcgcctccacaaagggccctagcgtgttcccactggctcctagcagcaagtctacaagcggaggaacagccgctctgggctgcctggtcaaggattactttcccgagcctgtgaccgtgtcctggaattctggcgctctgacaagcggcgtgcacacctttccagctgtgctgcaaagcagcggcctgtactctctgagcagcgtggtcacagtgccaagctctagcctgggcacccagacctacatctgcaatgtgaaccacaagcctagcaacaccaaggtggacaagagagtggaacccaagagctgcgacaagacccacacctgtcctccatgtcctgctccagaactgctggccggaccttccgtgttcctgtttcctccaaagcctaaggacaccctgatgatcagcagaacccctgaagtgacctgcgtggtggtggatgtgtctcacgaggaccctgaagtgaagttcaattggtacgtggacggcgtggaagtgcacaacgccaagaccaagcctagagaggaacagtacaacagcacctacagagtggtgtccgtgctgaccgtgctgcaccaggattggctgaacggcaaagagtacaagtgcaaggtgtccaacaaggccctgcctctgcctgaggaaaagaccatcagcaaggccaagggccagcctagggaaccccaggtttacacactgcctccaagccgcgaggaaatgaccaagaaccaggtgtccctgacctgcctcgtgaagggcttctacccttccgatatcgccgtggaatgggagagcaatggccagcctgagaacaactacaagacaacccctcctgtgctggacagcgacggctcattcttcctgtacagcaagctgaccgtggacaagtccagatggcagcagggcaacgtgttcagctgtagcgtgctgcacgaagccctgcacagccactacacccagaaaagcctgtctctgagccccggcaaatgataa

SEQ ID NO: 623 - protein, 480 aa, synthetic construct
MDWIWRILFLVGAATGAHSQGRLFQSGAEVKRPGASVRISCRADDDPYTDDDTFTKYWTHWIRQAPGQRPEWLGVISPHFARPIYSYKFRDRLTLTRDSSLTAVYLELKGLQPDDSGIYFCARDPFGDRAPHYNYHMDVWGGGTAVIVSSASTKGPSVFPLAPSSKSTSGGTAALGCLVKDYFPEPVTVSWNSGALTSGVHTFPAVLQSSGLYSLSSVVTVPSSSLGTQTYICNVNHKPSNTKVDKRVEPKSCDKTHTCPPCPAPELLAGPSVFLFPPKPKDTLMISRTPEVTCVVVDVSHEDPEVKFNWYVDGVEVHNAKTKPREEQYNSTYRVVSVLTVLHQDWLNGKEYKCKVSNKALPLPEEKTISKAKGQPREPQVYTLPPSREEMTKNQVSLTCLVKGFYPSDIAVEWESNGQPENNYKTTPPVLDSDGSFFLYSKLTVDKSRWQQGNVFSCSVLHEALHSHYTQKSLSLSPGK

SEQ ID NO: 624 - DNA, 1446 bp, synthetic construct
  source 1..1446: mol_type = other DNA
atggactggatctggcgcatcctgtttcttgtgggagccgccacaggcgcccattctcaaggcagactgtttcagtctggcgccgaagtgaaaagaccaggcgcctctgtgcggatcagctgcagagctgacgacgacccctacaccgacgacgataccttcaccaagtactggacccactggatcagacaggcccctggacaaagacctgagtggctgggagtgatcagccctcacttcgccagacctatctacagctacaagttccgggacagactgaccctgaccagagacagctctctgaccgccgtgtacctggaactgaagggcctgcagcctgacgacagcggcatctacttttgcgccagagatcccttcggcgacagagcccctcactacaactaccacatggacgtgtggggcggaggcacagccgtgatcgtttctagcgcctctacaaagggccccagcgtgttcccactggctcctagcagcaagtctacaagcggaggaacagctgccctgggctgcctggtcaaggattactttcctgagcctgtgaccgtgtcttggaactctggcgctctgacaagcggcgtgcacacatttccagccgtgctgcaaagcagcggcctgtactctctgagcagcgtggtcacagtgccaagctctagcctgggcacccagacctacatctgcaatgtgaaccacaagcctagcaacaccaaggtggacaagagagtggaacccaagagctgcgacaagacccacacctgtcctccatgtcctgctccagaactgctcggcggaccttccgtgttcctgtttcctccaaagcctaaggacaccctgatgatcagcagaacccctgaagtgacctgcgtggtggtggatgtgtctcacgaggacccagaagtgaagttcaattggtacgtggacggcgtggaagtgcacaacgccaagaccaagcctagagaggaacagtacaacagcacctacagagtggtgtccgtgctgacagtgctgcaccaggattggctgaacggcaaagagtacaagtgcaaggtgtccaacaaggccctgcctgctcctatcgagaaaaccatcagcaaggccaagggccagcctagggaaccccaggtttacaccctgcctccatgccgcgaggaaatgaccaagaaccaggtgtccctgtggtgcctcgtgaagggcttctacccttccgatatcgccgtggaatgggagagcaatggccagcctgagaacaactacaagacaacccctcctgtgctggacagcgacggctcattcttcctgtacagcaagctgaccgtggacaagtccagatggcagcagggcaacgtgttcagctgtagcgtgctgcacgaagccctgcacagccactacacccagaaaagcctgtctctgagccccggcaagtgataa

SEQ ID NO: 625 - RNA, 1446 nt, synthetic construct
  source 1..1446: mol_type = other RNA
atggactggatctggcgcatcctgtttcttgtgggagccgccacaggcgcccattctcaaggcagactgtttcagtctggcgccgaagtgaaaagaccaggcgcctctgtgcggatcagctgcagagctgacgacgacccctacaccgacgacgataccttcaccaagtactggacccactggatcagacaggcccctggacaaagacctgagtggctgggagtgatcagccctcacttcgccagacctatctacagctacaagttccgggacagactgaccctgaccagagacagctctctgaccgccgtgtacctggaactgaagggcctgcagcctgacgacagcggcatctacttttgcgccagagatcccttcggcgacagagcccctcactacaactaccacatggacgtgtggggcggaggcacagccgtgatcgtttctagcgcctctacaaagggccccagcgtgttcccactggctcctagcagcaagtctacaagcggaggaacagctgccctgggctgcctggtcaaggattactttcctgagcctgtgaccgtgtcttggaactctggcgctctgacaagcggcgtgcacacatttccagccgtgctgcaaagcagcggcctgtactctctgagcagcgtggtcacagtgccaagctctagcctgggcacccagacctacatctgcaatgtgaaccacaagcctagcaacaccaaggtggacaagagagtggaacccaagagctgcgacaagacccacacctgtcctccatgtcctgctccagaactgctcggcggaccttccgtgttcctgtttcctccaaagcctaaggacaccctgatgatcagcagaacccctgaagtgacctgcgtggtggtggatgtgtctcacgaggacccagaagtgaagttcaattggtacgtggacggcgtggaagtgcacaacgccaagaccaagcctagagaggaacagtacaacagcacctacagagtggtgtccgtgctgacagtgctgcaccaggattggctgaacggcaaagagtacaagtgcaaggtgtccaacaaggccctgcctgctcctatcgagaaaaccatcagcaaggccaagggccagcctagggaaccccaggtttacaccctgcctccatgccgcgaggaaatgaccaagaaccaggtgtccctgtggtgcctcgtgaagggcttctacccttccgatatcgccgtggaatgggagagcaatggccagcctgagaacaactacaagacaacccctcctgtgctggacagcgacggctcattcttcctgtacagcaagctgaccgtggacaagtccagatggcagcagggcaacgtgttcagctgtagcgtgctgcacgaagccctgcacagccactacacccagaaaagcctgtctctgagccccggcaagtgataa

SEQ ID NO: 626 - protein, 480 aa, synthetic construct
MDWIWRILFLVGAATGAHSQGRLFQSGAEVKRPGASVRISCRADDDPYTDDDTFTKYWTHWIRQAPGQRPEWLGVISPHFARPIYSYKFRDRLTLTRDSSLTAVYLELKGLQPDDSGIYFCARDPFGDRAPHYNYHMDVWGGGTAVIVSSASTKGPSVFPLAPSSKSTSGGTAALGCLVKDYFPEPVTVSWNSGALTSGVHTFPAVLQSSGLYSLSSVVTVPSSSLGTQTYICNVNHKPSNTKVDKRVEPKSCDKTHTCPPCPAPELLGGPSVFLFPPKPKDTLMISRTPEVTCVVVDVSHEDPEVKFNWYVDGVEVHNAKTKPREEQYNSTYRVVSVLTVLHQDWLNGKEYKCKVSNKALPAPIEKTISKAKGQPREPQVYTLPPCREEMTKNQVSLWCLVKGFYPSDIAVEWESNGQPENNYKTTPPVLDSDGSFFLYSKLTVDKSRWQQGNVFSCSVLHEALHSHYTQKSLSLSPGK

SEQ ID NO: 627 - DNA, 1458 bp, synthetic construct
  source 1..1458: mol_type = other DNA
atggattggatctggcgcatcctgtttctcgtgggagctgccacaggcgcccactctcagggcagactgtttcagtctggcgccgaagtgaaaagaccaggcgcctctgtgcggatcagctgcagagctgacgacgacccctacaccgacgacgataccttcaccaagtactggacccactggatcagacaggcccctggacaaagacctgagtggctgggagtgatcagccctcacttcgccagacctatctacagctacaagttccgggacagactgaccctgaccagagacagctctctgaccgccgtgtacctggaactgaagggcctgcagcctgacgacagcggcatctacttttgcgccagagatcccttcggcgacagagcccctcactacaactaccacatggacgtgtggggcggaggcacagccgtgatcgtttctagcgcatctgtggccgctcctagcgtgttcatcttcccacctagcgacgaggaactgaagtctggcacagccagcgtcgtgtgcctgctgaacaacttctaccccagagaagccaaggtgcagtggaaggtggacaacgccctgcagagcggcaatagccaagagagcgtgaccgagcaggacagcaaggactctacctacagcctgagcagcaccctgacactgagcaaggccgactacgagaagcacaaagtgtacgcctgcgaagtgacccaccagggcctttctagccctgtgaccaagagcttcaaccggggcgagtgcgataagacccacacctgtcctccatgtccagctccagaactgctcggcggaccttccgtgttcctgtttcctccaaagcctaaggacaccctgatgatcagcagaacccctgaagtgacctgcgtggtggtggatgtgtctcacgaggacccagaagtgaagttcaattggtacgtggacggcgtggaagtgcacaatgccaagaccaagcctagagaggaacagtacaacagcacctacagagtggtgtccgtgctgaccgtgctgcaccaggattggctgaacggcaaagagtacaagtgcaaggtgtccaacaaggccctgcctgctcctatcgagaaaaccatcagcaaggccaagggccagcctagggaaccccaggtttacacactgcctccaagccgcgaggaaatgaccaagaaccaggtgtccctgacctgcctggtcaagggcttctacccttccgatatcgccgtggaatgggagagcaatggccagcctgagaacaactacaagaccacacctcctgtgctggacagcgacggctcattcttcctgtacagcaagctgacagtggacaagagcagatggcagcagggcaacgtgttcagctgctctgtgctgcacgaagccctgcacagccactacacccagaaaagcctgagcctgtctcctggcaagtgataa

SEQ ID NO: 628 - RNA, 1458 nt, synthetic construct
  source 1..1458: mol_type = other RNA
atggattggatctggcgcatcctgtttctcgtgggagctgccacaggcgcccactctcagggcagactgtttcagtctggcgccgaagtgaaaagaccaggcgcctctgtgcggatcagctgcagagctgacgacgacccctacaccgacgacgataccttcaccaagtactggacccactggatcagacaggcccctggacaaagacctgagtggctgggagtgatcagccctcacttcgccagacctatctacagctacaagttccgggacagactgaccctgaccagagacagctctctgaccgccgtgtacctggaactgaagggcctgcagcctgacgacagcggcatctacttttgcgccagagatcccttcggcgacagagcccctcactacaactaccacatggacgtgtggggcggaggcacagccgtgatcgtttctagcgcatctgtggccgctcctagcgtgttcatcttcccacctagcgacgaggaactgaagtctggcacagccagcgtcgtgtgcctgctgaacaacttctaccccagagaagccaaggtgcagtggaaggtggacaacgccctgcagagcggcaatagccaagagagcgtgaccgagcaggacagcaaggactctacctacagcctgagcagcaccctgacactgagcaaggccgactacgagaagcacaaagtgtacgcctgcgaagtgacccaccagggcctttctagccctgtgaccaagagcttcaaccggggcgagtgcgataagacccacacctgtcctccatgtccagctccagaactgctcggcggaccttccgtgttcctgtttcctccaaagcctaaggacaccctgatgatcagcagaacccctgaagtgacctgcgtggtggtggatgtgtctcacgaggacccagaagtgaagttcaattggtacgtggacggcgtggaagtgcacaatgccaagaccaagcctagagaggaacagtacaacagcacctacagagtggtgtccgtgctgaccgtgctgcaccaggattggctgaacggcaaagagtacaagtgcaaggtgtccaacaaggccctgcctgctcctatcgagaaaaccatcagcaaggccaagggccagcctagggaaccccaggtttacacactgcctccaagccgcgaggaaatgaccaagaaccaggtgtccctgacctgcctggtcaagggcttctacccttccgatatcgccgtggaatgggagagcaatggccagcctgagaacaactacaagaccacacctcctgtgctggacagcgacggctcattcttcctgtacagcaagctgacagtggacaagagcagatggcagcagggcaacgtgttcagctgctctgtgctgcacgaagccctgcacagccactacacccagaaaagcctgagcctgtctcctggcaagtgataa

SEQ ID NO: 629 - protein, 484 aa, synthetic construct
MDWIWRILFLVGAATGAHSQGRLFQSGAEVKRPGASVRISCRADDDPYTDDDTFTKYWTHWIRQAPGQRPEWLGVISPHFARPIYSYKFRDRLTLTRDSSLTAVYLELKGLQPDDSGIYFCARDPFGDRAPHYNYHMDVWGGGTAVIVSSASVAAPSVFIFPPSDEELKSGTASVVCLLNNFYPREAKVQWKVDNALQSGNSQESVTEQDSKDSTYSLSSTLTLSKADYEKHKVYACEVTHQGLSSPVTKSFNRGECDKTHTCPPCPAPELLGGPSVFLFPPKPKDTLMISRTPEVTCVVVDVSHEDPEVKFNWYVDGVEVHNAKTKPREEQYNSTYRVVSVLTVLHQDWLNGKEYKCKVSNKALPAPIEKTISKAKGQPREPQVYTLPPSREEMTKNQVSLTCLVKGFYPSDIAVEWESNGQPENNYKTTPPVLDSDGSFFLYSKLTVDKSRWQQGNVFSCSVLHEALHSHYTQKSLSLSPGK

SEQ ID NO: 630 - DNA, 702 bp, synthetic construct
  source 1..702: mol_type = other DNA
atggattggatctggcgcatcctgtttctcgtgggagctgccacaggcgcccacagcgaagttgtgctgacacagagccccgccatcctgagtgttagccctggcgatagagtgatcctgagctgcagagcctctcagggcctcgattcttctcacctggcctggtacagattcaagcggggacagatccccacactggtcatcttcggcaccagcaacagagccagaggcacccctgatagattttccggctctggcagcggagccgacttcaccctgacaatcagcagagtggaacccgaggacttcgccacctactactgccagagatacggcggcacccctatcacatttggcggcggaaccacactggacaagaaaagcagcgcctctacaaagggccccagcgttttcccactggctcctagcagcaagagcacatctggcggaacagccgctctgggctgtctggtcaaggactactttcccgagcctgtgaccgtgtcctggaattctggcgctctgacatccggcgtgcacacctttccagctgtgctgcaaagcagcggcctgtactctctgagcagcgtggtcacagtgccaagctctagcctgggcacccagacctacatctgcaatgtgaaccacaagcctagcaacacgaaggtcgacaagagagtggaacccaagtcctgctgataa

SEQ ID NO: 631 - RNA, 702 nt, synthetic construct
  source 1..702: mol_type = other RNA
atggattggatctggcgcatcctgtttctcgtgggagctgccacaggcgcccacagcgaagttgtgctgacacagagccccgccatcctgagtgttagccctggcgatagagtgatcctgagctgcagagcctctcagggcctcgattcttctcacctggcctggtacagattcaagcggggacagatccccacactggtcatcttcggcaccagcaacagagccagaggcacccctgatagattttccggctctggcagcggagccgacttcaccctgacaatcagcagagtggaacccgaggacttcgccacctactactgccagagatacggcggcacccctatcacatttggcggcggaaccacactggacaagaaaagcagcgcctctacaaagggccccagcgttttcccactggctcctagcagcaagagcacatctggcggaacagccgctctgggctgtctggtcaaggactactttcccgagcctgtgaccgtgtcctggaattctggcgctctgacatccggcgtgcacacctttccagctgtgctgcaaagcagcggcctgtactctctgagcagcgtggtcacagtgccaagctctagcctgggcacccagacctacatctgcaatgtgaaccacaagcctagcaacacgaaggtcgacaagagagtggaacccaagtcctgctgataa

SEQ ID NO: 632 - protein, 232 aa, synthetic construct
MDWIWRILFLVGAATGAHSEVVLTQSPAILSVSPGDRVILSCRASQGLDSSHLAWYRFKRGQIPTLVIFGTSNRARGTPDRFSGSGSGADFTLTISRVEPEDFATYYCQRYGGTPITFGGGTTLDKKSSASTKGPSVFPLAPSSKSTSGGTAALGCLVKDYFPEPVTVSWNSGALTSGVHTFPAVLQSSGLYSLSSVVTVPSSSLGTQTYICNVNHKPSNTKVDKRVEPKSC

SEQ ID NO: 633 - DNA, 1446 bp, synthetic construct
  source 1..1446: mol_type = other DNA
atggattggatctggcgcatcctgtttctcgtgggagctgccacaggcgcccactctcagggcagactgtttcagtctggcgccgaagtgaaaagaccaggcgcctctgtgcggatcagctgcagagctgacgacgacccctacaccgacgacgataccttcaccaagtactggacccactggatcagacaggcccctggacaaagacctgagtggctgggagtgatcagccctcacttcgccagacctatctacagctacaagttccgggacagactgaccctgaccagagacagctctctgaccgccgtgtacctggaactgaagggcctgcagcctgacgacagcggcatctacttttgcgccagagatcccttcggcgacagagcccctcactacaactaccacatggacgtgtggggcggaggcacagccgtgatcgtttctagcgcttccacaaagggccctagcgtgttccctctggctcctagcagcaagtctacaagcggaggaacagctgccctgggctgcctggtggaagattactttcctgagcctgtgaccgtgtcctggaacagcggtgctctgacttctggcgtgcacacctttccagccgtgctgcaaagcagcggcctgtactctctgagcagcgtggtcacagtgccaagctctagcctgggcacccagacctacatctgcaatgtgaaccacaagcctagcaacaccaaggtggacgacagagtggaacccaagagctgcgacaagacccacacctgtcctccatgtcctgctccagaactgctcggcggaccttccgtgttcctgtttcctccaaagcctaaggacaccctgatgatcagcagaacccctgaagtgacctgcgtggtggtggatgtgtctcacgaggacccagaagtgaagttcaattggtacgtggacggcgtggaagtgcacaacgccaagaccaagcctagagaggaacagtacaacagcacctacagagtggtgtccgtgctgacagtgctgcaccaggattggctgaacggcaaagagtacaagtgcaaggtgtccaacaaggccctgcctgctcctatcgagaaaaccatcagcaaggccaagggccagcctagggaaccccaggtttacacactgcctccaagccgcgaggaaatgaccaagaaccaggtgtccctgacctgcctggtcaagggcttctacccttccgatatcgccgtggaatgggagagcaatggccagcctgagaacaactacaagacaacccctcctgtgctggacagcgacggctcattcttcctgtacagcaagctgaccgtggacaagagcagatggcagcagggcaacgtgttcagctgtagcgtgctgcacgaagccctgcacagccactacacccagaaaagcctgtctctgagccccggcaagtgataa

SEQ ID NO: 634 - RNA, 1446 nt, synthetic construct
  source 1..1446: mol_type = other RNA
atggattggatctggcgcatcctgtttctcgtgggagctgccacaggcgcccactctcagggcagactgtttcagtctggcgccgaagtgaaaagaccaggcgcctctgtgcggatcagctgcagagctgacgacgacccctacaccgacgacgataccttcaccaagtactggacccactggatcagacaggcccctggacaaagacctgagtggctgggagtgatcagccctcacttcgccagacctatctacagctacaagttccgggacagactgaccctgaccagagacagctctctgaccgccgtgtacctggaactgaagggcctgcagcctgacgacagcggcatctacttttgcgccagagatcccttcggcgacagagcccctcactacaactaccacatggacgtgtggggcggaggcacagccgtgatcgtttctagcgcttccacaaagggccctagcgtgttccctctggctcctagcagcaagtctacaagcggaggaacagctgccctgggctgcctggtggaagattactttcctgagcctgtgaccgtgtcctggaacagcggtgctctgacttctggcgtgcacacctttccagccgtgctgcaaagcagcggcctgtactctctgagcagcgtggtcacagtgccaagctctagcctgggcacccagacctacatctgcaatgtgaaccacaagcctagcaacaccaaggtggacgacagagtggaacccaagagctgcgacaagacccacacctgtcctccatgtcctgctccagaactgctcggcggaccttccgtgttcctgtttcctccaaagcctaaggacaccctgatgatcagcagaacccctgaagtgacctgcgtggtggtggatgtgtctcacgaggacccagaagtgaagttcaattggtacgtggacggcgtggaagtgcacaacgccaagaccaagcctagagaggaacagtacaacagcacctacagagtggtgtccgtgctgacagtgctgcaccaggattggctgaacggcaaagagtacaagtgcaaggtgtccaacaaggccctgcctgctcctatcgagaaaaccatcagcaaggccaagggccagcctagggaaccccaggtttacacactgcctccaagccgcgaggaaatgaccaagaaccaggtgtccctgacctgcctggtcaagggcttctacccttccgatatcgccgtggaatgggagagcaatggccagcctgagaacaactacaagacaacccctcctgtgctggacagcgacggctcattcttcctgtacagcaagctgaccgtggacaagagcagatggcagcagggcaacgtgttcagctgtagcgtgctgcacgaagccctgcacagccactacacccagaaaagcctgtctctgagccccggcaagtgataa

SEQ ID NO: 635 - protein, 480 aa, synthetic construct
MDWIWRILFLVGAATGAHSQGRLFQSGAEVKRPGASVRISCRADDDPYTDDDTFTKYWTHWIRQAPGQRPEWLGVISPHFARPIYSYKFRDRLTLTRDSSLTAVYLELKGLQPDDSGIYFCARDPFGDRAPHYNYHMDVWGGGTAVIVSSASTKGPSVFPLAPSSKSTSGGTAALGCLVEDYFPEPVTVSWNSGALTSGVHTFPAVLQSSGLYSLSSVVTVPSSSLGTQTYICNVNHKPSNTKVDDRVEPKSCDKTHTCPPCPAPELLGGPSVFLFPPKPKDTLMISRTPEVTCVVVDVSHEDPEVKFNWYVDGVEVHNAKTKPREEQYNSTYRVVSVLTVLHQDWLNGKEYKCKVSNKALPAPIEKTISKAKGQPREPQVYTLPPSREEMTKNQVSLTCLVKGFYPSDIAVEWESNGQPENNYKTTPPVLDSDGSFFLYSKLTVDKSRWQQGNVFSCSVLHEALHSHYTQKSLSLSPGK

SEQ ID NO: 636 - DNA, 708 bp, synthetic construct
  source 1..708: mol_type = other DNA
atggattggatttggagaatcctgttcctcgtgggcgccgctaccggagcccactccgaagttgtgctgacacagagccccgccatcctgagtgttagccctggcgatagagtgatcctgagctgcagagcctctcagggcctcgattcttctcacctggcctggtacagattcaagcggggacagatccccacactggtcatcttcggcaccagcaacagagccagaggcacccctgatagattttccggctctggcagcggagccgacttcaccctgacaatcagcagagtggaacccgaggacttcgccacctactactgccagagatacggcggcacccctatcacatttggcggcggaaccacactggacaagaaacgtacggtggccgctcctagcgtgttcatctttccacctagcgacaagagactgaagtctggcacagcctctgtcgtgtgcctgctcaacaacttctaccccagagaagccaaggtgcagtggaaggtggacaacgccctgcagagcggcaatagccaagagagcgtgaccgagcaggacagcaaggactctacctacagcctgagcagcacactgaccctgagcaaggccgactacgagaagcacaaagtgtacgcctgcgaagtgacccaccagggcctttctagccctgtgaccaagagcttcaaccggggcgagtgctgataa

SEQ ID NO: 637 - RNA, 708 nt, synthetic construct; identical to SEQ ID NO: 452
  source 1..708: mol_type = other RNA

SEQ ID NO: 638 - protein, 234 aa, synthetic construct
MDWIWRILFLVGAATGAHSEVVLTQSPAILSVSPGDRVILSCRASQGLDSSHLAWYRFKRGQIPTLVIFGTSNRARGTPDRFSGSGSGADFTLTISRVEPEDFATYYCQRYGGTPITFGGGTTLDKKRTVAAPSVFIFPPSDKRLKSGTASVVCLLNNFYPREAKVQWKVDNALQSGNSQESVTEQDSKDSTYSLSSTLTLSKADYEKHKVYACEVTHQGLSSPVTKSFNRGEC

SEQ ID NO: 639 - DNA, 1446 bp, synthetic construct
  source 1..1446: mol_type = other DNA
atggattggatctggcgcatcctgtttctcgtgggagctgccacaggcgcccactctcagggcagactgtttcagtctggcgccgaagtgaaaagaccaggcgcctctgtgcggatcagctgcagagctgacgacgacccctacaccgacgacgataccttcaccaagtactggacccactggatcagacaggcccctggacaaagacctgagtggctgggagtgatcagccctcacttcgccagacctatctacagctacaagttccgggacagactgaccctgaccagagacagctctctgaccgccgtgtacctggaactgaagggcctgcagcctgacgacagcggcatctacttttgcgccagagatcccttcggcgacagagcccctcactacaactaccacatggacgtgtggggcggaggcacagccgtgatcgtttctagcgcttccacaaagggccctagcgtgttccctctggctcctagcagcaagtctacaagcggaggaacagccgctctgggctgcctggtggaagattactttcccgagcctgtgaccgtgtcctggaattctggcgctctgacaagcggcgtgcacacctttccagctgtgctgcaaagcagcggcctgtactctctgagcagcgtggtcacagtgccaagctctagcctgggcacccagacctacatctgcaatgtgaaccacaagcctagcaacaccaaggtggacgacagagtggaacccaagagctgcgacaagacccacacctgtcctccatgtcctgctccagaactgctcggcggaccttccgtgttcctgtttcctccaaagcctaaggacaccctgatgatcagcagaacccctgaagtgacctgcgtggtggtggatgtgtctcacgaggaccccgaagtgaagttcaattggtacgtggacggcgtggaagtgcacaacgccaagaccaagcctagagaggaacagtacaacagcacctacagagtggtgtccgtgctgaccgtgctgcaccaggattggctgaacggcaaagagtacaagtgcaaggtgtccaacaaggccctgcctgctcctatcgagaaaaccatcagcaaggccaagggccagcctcgcgaacctcaagtctgtacactgcctcctagccgcgaggaaatgaccaagaaccaggtgtccctgagctgcgccgtgaagggcttttacccttccgatatcgccgtggaatgggagagcaatggccagcctgagaacaactacaagacaacccctcctgtgctggacagcgacggctcattcttcctggtgtccaagctgacagtggacaagagcagatggcagcagggcaacgtgttcagctgcagcgtgctgcatgaagccctgcacagccactacacccagaagtccctgtctctgagccccggcaagtgataa

SEQ ID NO: 640 - RNA, 1446 nt, synthetic construct
  source 1..1446: mol_type = other RNA
atggattggatctggcgcatcctgtttctcgtgggagctgccacaggcgcccactctcagggcagactgtttcagtctggcgccgaagtgaaaagaccaggcgcctctgtgcggatcagctgcagagctgacgacgacccctacaccgacgacgataccttcaccaagtactggacccactggatcagacaggcccctggacaaagacctgagtggctgggagtgatcagccctcacttcgccagacctatctacagctacaagttccgggacagactgaccctgaccagagacagctctctgaccgccgtgtacctggaactgaagggcctgcagcctgacgacagcggcatctacttttgcgccagagatcccttcggcgacagagcccctcactacaactaccacatggacgtgtggggcggaggcacagccgtgatcgtttctagcgcttccacaaagggccctagcgtgttccctctggctcctagcagcaagtctacaagcggaggaacagccgctctgggctgcctggtggaagattactttcccgagcctgtgaccgtgtcctggaattctggcgctctgacaagcggcgtgcacacctttccagctgtgctgcaaagcagcggcctgtactctctgagcagcgtggtcacagtgccaagctctagcctgggcacccagacctacatctgcaatgtgaaccacaagcctagcaacaccaaggtggacgacagagtggaacccaagagctgcgacaagacccacacctgtcctccatgtcctgctccagaactgctcggcggaccttccgtgttcctgtttcctccaaagcctaaggacaccctgatgatcagcagaacccctgaagtgacctgcgtggtggtggatgtgtctcacgaggaccccgaagtgaagttcaattggtacgtggacggcgtggaagtgcacaacgccaagaccaagcctagagaggaacagtacaacagcacctacagagtggtgtccgtgctgaccgtgctgcaccaggattggctgaacggcaaagagtacaagtgcaaggtgtccaacaaggccctgcctgctcctatcgagaaaaccatcagcaaggccaagggccagcctcgcgaacctcaagtctgtacactgcctcctagccgcgaggaaatgaccaagaaccaggtgtccctgagctgcgccgtgaagggcttttacccttccgatatcgccgtggaatgggagagcaatggccagcctgagaacaactacaagacaacccctcctgtgctggacagcgacggctcattcttcctggtgtccaagctgacagtggacaagagcagatggcagcagggcaacgtgttcagctgcagcgtgctgcatgaagccctgcacagccactacacccagaagtccctgtctctgagccccggcaagtgataa

SEQ ID NO: 641 - protein, 480 aa, synthetic construct
MDWIWRILFLVGAATGAHSQGRLFQSGAEVKRPGASVRISCRADDDPYTDDDTFTKYWTHWIRQAPGQRPEWLGVISPHFARPIYSYKFRDRLTLTRDSSLTAVYLELKGLQPDDSGIYFCARDPFGDRAPHYNYHMDVWGGGTAVIVSSASTKGPSVFPLAPSSKSTSGGTAALGCLVEDYFPEPVTVSWNSGALTSGVHTFPAVLQSSGLYSLSSVVTVPSSSLGTQTYICNVNHKPSNTKVDDRVEPKSCDKTHTCPPCPAPELLGGPSVFLFPPKPKDTLMISRTPEVTCVVVDVSHEDPEVKFNWYVDGVEVHNAKTKPREEQYNSTYRVVSVLTVLHQDWLNGKEYKCKVSNKALPAPIEKTISKAKGQPREPQVCTLPPSREEMTKNQVSLSCAVKGFYPSDIAVEWESNGQPENNYKTTPPVLDSDGSFFLVSKLTVDKSRWQQGNVFSCSVLHEALHSHYTQKSLSLSPGK

SEQ ID NO: 642 - DNA, 1446 bp, synthetic construct
  source 1..1446: mol_type = other DNA
atggattggatctggcgcatcctgtttctcgtgggagctgccacaggcgcccactctcagggcagactgtttcagtctggcgccgaagtgaaaagaccaggcgcctctgtgcggatcagctgcagagctgacgacgacccctacaccgacgacgataccttcaccaagtactggacccactggatcagacaggcccctggacaaagacctgagtggctgggagtgatcagccctcacttcgccagacctatctacagctacaagttccgggacagactgaccctgaccagagacagctctctgaccgccgtgtacctggaactgaagggcctgcagcctgacgacagcggcatctacttttgcgccagagatcccttcggcgacagagcccctcactacaactaccacatggacgtgtggggcggaggcacagccgtgatcgtttctagcgcttccacaaagggccctagcgtgttccctctggctcctagcagcaagtctacaagcggaggaacagccgctctgggctgcctggtggaagattactttcccgagcctgtgaccgtgtcctggaattctggcgctctgacaagcggcgtgcacacctttccagctgtgctgcaaagcagcggcctgtactctctgagcagcgtggtcacagtgccaagctctagcctgggcacccagacctacatctgcaatgtgaaccacaagcctagcaacaccaaggtggacgacagagtggaacccaagagctgcgacaagacccacacctgtcctccatgtcctgctccagaactgctcggcggaccttccgtgttcctgtttcctccaaagcctaaggacaccctgatgatcagcagaacccctgaagtgacctgcgtggtggtggatgtgtctcacgaggaccccgaagtgaagttcaattggtacgtggacggcgtggaagtgcacaacgccaagaccaagcctagagaggaacagtacaacagcacctacagagtggtgtccgtgctgaccgtgctgcaccaggattggctgaacggcaaagagtacaagtgcaaggtgtccaacaaggccctgcctgctcctatcgagaaaaccatcagcaaggccaagggccagcctagggaaccccaggtttacaccctgcctccatgccgcgaggaaatgaccaagaaccaggtgtccctgtggtgcctggtcaagggcttctacccttccgatatcgccgtggaatgggagagcaatggccagcctgagaacaactacaagacaacccctcctgtgctggacagcgacggctcattcttcctgtacagcaagctgacagtggacaagagcagatggcagcagggcaacgtgttcagctgcagcgtgctgcatgaagccctgcacagccactacacccagaagtccctgtctctgagccccggcaagtgataa

SEQ ID NO: 643 - RNA, 1446 nt, synthetic construct
  source 1..1446: mol_type = other RNA
atggattggatctggcgcatcctgtttctcgtgggagctgccacaggcgcccactctcagggcagactgtttcagtctggcgccgaagtgaaaagaccaggcgcctctgtgcggatcagctgcagagctgacgacgacccctacaccgacgacgataccttcaccaagtactggacccactggatcagacaggcccctggacaaagacctgagtggctgggagtgatcagccctcacttcgccagacctatctacagctacaagttccgggacagactgaccctgaccagagacagctctctgaccgccgtgtacctggaactgaagggcctgcagcctgacgacagcggcatctacttttgcgccagagatcccttcggcgacagagcccctcactacaactaccacatggacgtgtggggcggaggcacagccgtgatcgtttctagcgcttccacaaagggccctagcgtgttccctctggctcctagcagcaagtctacaagcggaggaacagccgctctgggctgcctggtggaagattactttcccgagcctgtgaccgtgtcctggaattctggcgctctgacaagcggcgtgcacacctttccagctgtgctgcaaagcagcggcctgtactctctgagcagcgtggtcacagtgccaagctctagcctgggcacccagacctacatctgcaatgtgaaccacaagcctagcaacaccaaggtggacgacagagtggaacccaagagctgcgacaagacccacacctgtcctccatgtcctgctccagaactgctcggcggaccttccgtgttcctgtttcctccaaagcctaaggacaccctgatgatcagcagaacccctgaagtgacctgcgtggtggtggatgtgtctcacgaggaccccgaagtgaagttcaattggtacgtggacggcgtggaagtgcacaacgccaagaccaagcctagagaggaacagtacaacagcacctacagagtggtgtccgtgctgaccgtgctgcaccaggattggctgaacggcaaagagtacaagtgcaaggtgtccaacaaggccctgcctgctcctatcgagaaaaccatcagcaaggccaagggccagcctagggaaccccaggtttacaccctgcctccatgccgcgaggaaatgaccaagaaccaggtgtccctgtggtgcctggtcaagggcttctacccttccgatatcgccgtggaatgggagagcaatggccagcctgagaacaactacaagacaacccctcctgtgctggacagcgacggctcattcttcctgtacagcaagctgacagtggacaagagcagatggcagcagggcaacgtgttcagctgcagcgtgctgcatgaagccctgcacagccactacacccagaagtccctgtctctgagccccggcaagtgataa

SEQ ID NO: 644 - protein, 480 aa, synthetic construct
MDWIWRILFLVGAATGAHSQGRLFQSGAEVKRPGASVRISCRADDDPYTDDDTFTKYWTHWIRQAPGQRPEWLGVISPHFARPIYSYKFRDRLTLTRDSSLTAVYLELKGLQPDDSGIYFCARDPFGDRAPHYNYHMDVWGGGTAVIVSSASTKGPSVFPLAPSSKSTSGGTAALGCLVEDYFPEPVTVSWNSGALTSGVHTFPAVLQSSGLYSLSSVVTVPSSSLGTQTYICNVNHKPSNTKVDDRVEPKSCDKTHTCPPCPAPELLGGPSVFLFPPKPKDTLMISRTPEVTCVVVDVSHEDPEVKFNWYVDGVEVHNAKTKPREEQYNSTYRVVSVLTVLHQDWLNGKEYKCKVSNKALPAPIEKTISKAKGQPREPQVYTLPPCREEMTKNQVSLWCLVKGFYPSDIAVEWESNGQPENNYKTTPPVLDSDGSFFLYSKLTVDKSRWQQGNVFSCSVLHEALHSHYTQKSLSLSPGK

SEQ ID NO: 645 - DNA, 1446 bp, synthetic construct
  source 1..1446: mol_type = other DNA
atggactggatctggcgcatcctgtttcttgtgggagccgccacaggcgcccattctcagggcagactgtttcagtctggcgccgaagtgaaaagaccaggcgcctctgtgcggatcagctgcagagctgacgacgacccctacaccgacgacgataccttcaccaagtactggacccactggatcagacaggcccctggacaaagacctgagtggctgggagtgatcagccctcacttcgccagacctatctacagctacaagttccgggacagactgaccctgaccagagacagctctctgaccgccgtgtacctggaactgaagggcctgcagcctgacgacagcggcatctacttttgcgccagagatcccttcggcgacagagcccctcactacaactaccacatggacgtgtggggcggaggcacagccgtgatcgtttctagcgcctccacaaagggccctagcgtgttcccactggctcctagcagcaagtctacaagcggaggaacagccgctctgggctgcctggtggaagattactttcccgagcctgtgaccgtgtcctggaattctggcgctctgacaagcggcgtgcacacctttccagctgtgctgcaaagcagcggcctgtactctctgagcagcgtggtcacagtgccaagctctagcctgggcacccagacctacatctgcaatgtgaaccacaagcctagcaacaccaaggtggacgacagagtggaacccaagagctgcgacaagacccacacctgtcctccatgtcctgctccagaactgctggccggaccttccgtgttcctgtttcctccaaagcctaaggacaccctgatgatcagcagaacccctgaagtgacctgcgtggtggtggatgtgtctcacgaggaccctgaagtgaagttcaattggtacgtggacggcgtggaagtgcacaacgccaagaccaagcctagagaggaacagtacaacagcacctacagagtggtgtccgtgctgaccgtgctgcaccaggattggctgaacggcaaagagtacaagtgcaaggtgtccaacaaggccctgcctctgcctgaggaaaagaccatcagcaaggccaagggccagcctagggaaccccaggtttacacactgcctccaagccgcgaggaaatgaccaagaaccaggtgtccctgacctgcctggtcaagggcttctacccttccgatatcgccgtggaatgggagagcaatggccagcctgagaacaactacaagacaacccctcctgtgctggacagcgacggctcattcttcctgtacagcaagctgaccgtggacaagtccagatggcagcagggcaacgtgttcagctgtagcgtgctgcacgaagccctgcacagccactacacccagaaaagcctgtctctgagccccggcaaatgataa

SEQ ID NO: 646 - RNA, 1446 nt, synthetic construct
  source 1..1446: mol_type = other RNA
atggactggatctggcgcatcctgtttcttgtgggagccgccacaggcgcccattctcagggcagactgtttcagtctggcgccgaagtgaaaagaccaggcgcctctgtgcggatcagctgcagagctgacgacgacccctacaccgacgacgataccttcaccaagtactggacccactggatcagacaggcccctggacaaagacctgagtggctgggagtgatcagccctcacttcgccagacctatctacagctacaagttccgggacagactgaccctgaccagagacagctctctgaccgccgtgtacctggaactgaagggcctgcagcctgacgacagcggcatctacttttgcgccagagatcccttcggcgacagagcccctcactacaactaccacatggacgtgtggggcggaggcacagccgtgatcgtttctagcgcctccacaaagggccctagcgtgttcccactggctcctagcagcaagtctacaagcggaggaacagccgctctgggctgcctggtggaagattactttcccgagcctgtgaccgtgtcctggaattctggcgctctgacaagcggcgtgcacacctttccagctgtgctgcaaagcagcggcctgtactctctgagcagcgtggtcacagtgccaagctctagcctgggcacccagacctacatctgcaatgtgaaccacaagcctagcaacaccaaggtggacgacagagtggaacccaagagctgcgacaagacccacacctgtcctccatgtcctgctccagaactgctggccggaccttccgtgttcctgtttcctccaaagcctaaggacaccctgatgatcagcagaacccctgaagtgacctgcgtggtggtggatgtgtctcacgaggaccctgaagtgaagttcaattggtacgtggacggcgtggaagtgcacaacgccaagaccaagcctagagaggaacagtacaacagcacctacagagtggtgtccgtgctgaccgtgctgcaccaggattggctgaacggcaaagagtacaagtgcaaggtgtccaacaaggccctgcctctgcctgaggaaaagaccatcagcaaggccaagggccagcctagggaaccccaggtttacacactgcctccaagccgcgaggaaatgaccaagaaccaggtgtccctgacctgcctggtcaagggcttctacccttccgatatcgccgtggaatgggagagcaatggccagcctgagaacaactacaagacaacccctcctgtgctggacagcgacggctcattcttcctgtacagcaagctgaccgtggacaagtccagatggcagcagggcaacgtgttcagctgtagcgtgctgcacgaagccctgcacagccactacacccagaaaagcctgtctctgagccccggcaaatgataa

SEQ ID NO: 647 - protein, 480 aa, synthetic construct
MDWIWRILFLVGAATGAHSQGRLFQSGAEVKRPGASVRISCRADDDPYTDDDTFTKYWTHWIRQAPGQRPEWLGVISPHFARPIYSYKFRDRLTLTRDSSLTAVYLELKGLQPDDSGIYFCARDPFGDRAPHYNYHMDVWGGGTAVIVSSASTKGPSVFPLAPSSKSTSGGTAALGCLVEDYFPEPVTVSWNSGALTSGVHTFPAVLQSSGLYSLSSVVTVPSSSLGTQTYICNVNHKPSNTKVDDRVEPKSCDKTHTCPPCPAPELLAGPSVFLFPPKPKDTLMISRTPEVTCVVVDVSHEDPEVKFNWYVDGVEVHNAKTKPREEQYNSTYRVVSVLTVLHQDWLNGKEYKCKVSNKALPLPEEKTISKAKGQPREPQVYTLPPSREEMTKNQVSLTCLVKGFYPSDIAVEWESNGQPENNYKTTPPVLDSDGSFFLYSKLTVDKSRWQQGNVFSCSVLHEALHSHYTQKSLSLSPGK

SEQ ID NO: 648 - DNA, 1446 bp, synthetic construct
  source 1..1446: mol_type = other DNA
atggattggatctggcgcatcctgtttctcgtgggagctgccacaggcgcccactctcagggcagactgtttcagtctggcgccgaagtgaaaagaccaggcgcctctgtgcggatcagctgcagagctgacgacgacccctacaccgacgacgataccttcaccaagtactggacccactggatcagacaggcccctggacaaagacctgagtggctgggagtgatcagccctcacttcgccagacctatctacagctacaagttccgggacagactgaccctgaccagagacagctctctgaccgccgtgtacctggaactgaagggcctgcagcctgacgacagcggcatctacttttgcgccagagatcccttcggcgacagagcccctcactacaactaccacatggacgtgtggggcggaggcacagccgtgatcgtttctagcgcttccacaaagggccctagcgtgttccctctggctcctagcagcaagtctacaagcggaggaacagccgctctgggctgcctggtggaagattactttcccgagcctgtgaccgtgtcctggaattctggcgctctgacaagcggcgtgcacacctttccagctgtgctgcaaagcagcggcctgtactctctgagcagcgtggtcacagtgccaagctctagcctgggcacccagacctacatctgcaatgtgaaccacaagcctagcaacaccaaggtggacgacagagtggaacccaagagctgcgacaagacccacacctgtcctccatgtcctgctccagaactgctggccggaccttccgtgttcctgtttcctccaaagcctaaggacaccctgatgatcagcagaacccctgaagtgacctgcgtggtggtggatgtgtctcacgaggaccccgaagtgaagttcaattggtacgtggacggcgtggaagtgcacaacgccaagaccaagcctagagaggaacagtacaacagcacctacagagtggtgtccgtgctgaccgtgctgcaccaggattggctgaacggcaaagagtacaagtgcaaggtgtccaacaaggccctgcctctgcctgaggaaaagaccatcagcaaggccaagggccagcctagggaaccccaagtctgtacactgcctcctagccgcgaggaaatgaccaagaaccaggtgtccctgagctgcgccgtgaagggcttttacccttccgatatcgccgtggaatgggagagcaatggccagcctgagaacaactacaagacaacccctcctgtgctggacagcgacggctcattcttcctggtgtccaagctgacagtggacaagagcagatggcagcagggcaacgtgttcagctgcagcgtgctgcatgaagccctgcacagccactacacccagaagtccctgtctctgagccccggcaagtgataa

SEQ ID NO: 649 - RNA, 1446 nt, synthetic construct
  source 1..1446: mol_type = other RNA
atggattggatctggcgcatcctgtttctcgtgggagctgccacaggcgcccactctcagggcagactgtttcagtctggcgccgaagtgaaaagaccaggcgcctctgtgcggatcagctgcagagctgacgacgacccctacaccgacgacgataccttcaccaagtactggacccactggatcagacaggcccctggacaaagacctgagtggctgggagtgatcagccctcacttcgccagacctatctacagctacaagttccgggacagactgaccctgaccagagacagctctctgaccgccgtgtacctggaactgaagggcctgcagcctgacgacagcggcatctacttttgcgccagagatcccttcggcgacagagcccctcactacaactaccacatggacgtgtggggcggaggcacagccgtgatcgtttctagcgcttccacaaagggccctagcgtgttccctctggctcctagcagcaagtctacaagcggaggaacagccgctctgggctgcctggtggaagattactttcccgagcctgtgaccgtgtcctggaattctggcgctctgacaagcggcgtgcacacctttccagctgtgctgcaaagcagcggcctgtactctctgagcagcgtggtcacagtgccaagctctagcctgggcacccagacctacatctgcaatgtgaaccacaagcctagcaacaccaaggtggacgacagagtggaacccaagagctgcgacaagacccacacctgtcctccatgtcctgctccagaactgctggccggaccttccgtgttcctgtttcctccaaagcctaaggacaccctgatgatcagcagaacccctgaagtgacctgcgtggtggtggatgtgtctcacgaggaccccgaagtgaagttcaattggtacgtggacggcgtggaagtgcacaacgccaagaccaagcctagagaggaacagtacaacagcacctacagagtggtgtccgtgctgaccgtgctgcaccaggattggctgaacggcaaagagtacaagtgcaaggtgtccaacaaggccctgcctctgcctgaggaaaagaccatcagcaaggccaagggccagcctagggaaccccaagtctgtacactgcctcctagccgcgaggaaatgaccaagaaccaggtgtccctgagctgcgccgtgaagggcttttacccttccgatatcgccgtggaatgggagagcaatggccagcctgagaacaactacaagacaacccctcctgtgctggacagcgacggctcattcttcctggtgtccaagctgacagtggacaagagcagatggcagcagggcaacgtgttcagctgcagcgtgctgcatgaagccctgcacagccactacacccagaagtccctgtctctgagccccggcaagtgataa

SEQ ID NO: 650 - protein, 480 aa, synthetic construct
MDWIWRILFLVGAATGAHSQGRLFQSGAEVKRPGASVRISCRADDDPYTDDDTFTKYWTHWIRQAPGQRPEWLGVISPHFARPIYSYKFRDRLTLTRDSSLTAVYLELKGLQPDDSGIYFCARDPFGDRAPHYNYHMDVWGGGTAVIVSSASTKGPSVFPLAPSSKSTSGGTAALGCLVEDYFPEPVTVSWNSGALTSGVHTFPAVLQSSGLYSLSSVVTVPSSSLGTQTYICNVNHKPSNTKVDDRVEPKSCDKTHTCPPCPAPELLAGPSVFLFPPKPKDTLMISRTPEVTCVVVDVSHEDPEVKFNWYVDGVEVHNAKTKPREEQYNSTYRVVSVLTVLHQDWLNGKEYKCKVSNKALPLPEEKTISKAKGQPREPQVCTLPPSREEMTKNQVSLSCAVKGFYPSDIAVEWESNGQPENNYKTTPPVLDSDGSFFLVSKLTVDKSRWQQGNVFSCSVLHEALHSHYTQKSLSLSPGK

SEQ ID NO: 651 - DNA, 1446 bp, synthetic construct
  source 1..1446: mol_type = other DNA
atggattggatctggcgcatcctgtttctcgtgggagctgccacaggcgcccactctcagggcagactgtttcagtctggcgccgaagtgaaaagaccaggcgcctctgtgcggatcagctgcagagctgacgacgacccctacaccgacgacgataccttcaccaagtactggacccactggatcagacaggcccctggacaaagacctgagtggctgggagtgatcagccctcacttcgccagacctatctacagctacaagttccgggacagactgaccctgaccagagacagctctctgaccgccgtgtacctggaactgaagggcctgcagcctgacgacagcggcatctacttttgcgccagagatcccttcggcgacagagcccctcactacaactaccacatggacgtgtggggcggaggcacagccgtgatcgtttctagcgcttccacaaagggccctagcgtgttccctctggctcctagcagcaagtctacaagcggaggaacagccgctctgggctgcctggtggaagattactttcccgagcctgtgaccgtgtcctggaattctggcgctctgacaagcggcgtgcacacctttccagctgtgctgcaaagcagcggcctgtactctctgagcagcgtggtcacagtgccaagctctagcctgggcacccagacctacatctgcaatgtgaaccacaagcctagcaacaccaaggtggacgacagagtggaacccaagagctgcgacaagacccacacctgtcctccatgtcctgctccagaactgctggccggaccttccgtgttcctgtttcctccaaagcctaaggacaccctgatgatcagcagaacccctgaagtgacctgcgtggtggtggatgtgtctcacgaggaccccgaagtgaagttcaattggtacgtggacggcgtggaagtgcacaacgccaagaccaagcctagagaggaacagtacaacagcacctacagagtggtgtccgtgctgaccgtgctgcaccaggattggctgaacggcaaagagtacaagtgcaaggtgtccaacaaggccctgcctctgcctgaggaaaagaccatcagcaaggccaagggccagcctagggaaccccaggtttacaccctgcctccatgccgcgaggaaatgacaaagaaccaggtgtccctgtggtgcctggtcaagggcttctacccttccgatatcgccgtggaatgggagagcaatggccagcctgagaacaactacaagacaacccctcctgtgctggacagcgacggctcattcttcctgtacagcaagctgacagtggacaagagcagatggcagcagggcaacgtgttcagctgcagcgtgctgcatgaagccctgcacagccactacacccagaagtccctgtctctgagccccggcaagtgataa

SEQ ID NO: 652 - RNA, 1446 nt, synthetic construct
  source 1..1446: mol_type = other RNA
atggattggatctggcgcatcctgtttctcgtgggagctgccacaggcgcccactctcagggcagactgtttcagtctggcgccgaagtgaaaagaccaggcgcctctgtgcggatcagctgcagagctgacgacgacccctacaccgacgacgataccttcaccaagtactggacccactggatcagacaggcccctggacaaagacctgagtggctgggagtgatcagccctcacttcgccagacctatctacagctacaagttccgggacagactgaccctgaccagagacagctctctgaccgccgtgtacctggaactgaagggcctgcagcctgacgacagcggcatctacttttgcgccagagatcccttcggcgacagagcccctcactacaactaccacatggacgtgtggggcggaggcacagccgtgatcgtttctagcgcttccacaaagggccctagcgtgttccctctggctcctagcagcaagtctacaagcggaggaacagccgctctgggctgcctggtggaagattactttcccgagcctgtgaccgtgtcctggaattctggcgctctgacaagcggcgtgcacacctttccagctgtgctgcaaagcagcggcctgtactctctgagcagcgtggtcacagtgccaagctctagcctgggcacccagacctacatctgcaatgtgaaccacaagcctagcaacaccaaggtggacgacagagtggaacccaagagctgcgacaagacccacacctgtcctccatgtcctgctccagaactgctggccggaccttccgtgttcctgtttcctccaaagcctaaggacaccctgatgatcagcagaacccctgaagtgacctgcgtggtggtggatgtgtctcacgaggaccccgaagtgaagttcaattggtacgtggacggcgtggaagtgcacaacgccaagaccaagcctagagaggaacagtacaacagcacctacagagtggtgtccgtgctgaccgtgctgcaccaggattggctgaacggcaaagagtacaagtgcaaggtgtccaacaaggccctgcctctgcctgaggaaaagaccatcagcaaggccaagggccagcctagggaaccccaggtttacaccctgcctccatgccgcgaggaaatgacaaagaaccaggtgtccctgtggtgcctggtcaagggcttctacccttccgatatcgccgtggaatgggagagcaatggccagcctgagaacaactacaagacaacccctcctgtgctggacagcgacggctcattcttcctgtacagcaagctgacagtggacaagagcagatggcagcagggcaacgtgttcagctgcagcgtgctgcatgaagccctgcacagccactacacccagaagtccctgtctctgagccccggcaagtgataa

SEQ ID NO: 653 - protein, 480 aa, synthetic construct
MDWIWRILFLVGAATGAHSQGRLFQSGAEVKRPGASVRISCRADDDPYTDDDTFTKYWTHWIRQAPGQRPEWLGVISPHFARPIYSYKFRDRLTLTRDSSLTAVYLELKGLQPDDSGIYFCARDPFGDRAPHYNYHMDVWGGGTAVIVSSASTKGPSVFPLAPSSKSTSGGTAALGCLVEDYFPEPVTVSWNSGALTSGVHTFPAVLQSSGLYSLSSVVTVPSSSLGTQTYICNVNHKPSNTKVDDRVEPKSCDKTHTCPPCPAPELLAGPSVFLFPPKPKDTLMISRTPEVTCVVVDVSHEDPEVKFNWYVDGVEVHNAKTKPREEQYNSTYRVVSVLTVLHQDWLNGKEYKCKVSNKALPLPEEKTISKAKGQPREPQVYTLPPCREEMTKNQVSLWCLVKGFYPSDIAVEWESNGQPENNYKTTPPVLDSDGSFFLYSKLTVDKSRWQQGNVFSCSVLHEALHSHYTQKSLSLSPGK

SEQ ID NO: 654 - DNA, 1596 bp, synthetic construct
  source 1..1596: mol_type = other DNA
atggattggatctggcgcatcctgtttctcgtgggagctgccacaggcgcccattctcaaggcagactgtttcagtctggcgccgaagtgaaaagaccaggcgcctctgtgcggatcagctgcagagctgacgacgacccctacaccgacgacgataccttcaccaagtactggacccactggatcagacaggcccctggacaaagacctgagtggctgggagtgatcagccctcacttcgccagacctatctacagctacaagttccgggacagactgaccctgaccagagacagctctctgaccgccgtgtacctggaactgaagggcctgcagcctgacgacagcggcatctacttttgcgccagagatcccttcggcgacagagcccctcactacaactaccacatggacgtgtggggcggaggcacagccgtgatagtgtcttccggtggcggaggaagcggaggcggaggttcaggcggcggaggctctggcggtggtggatctgaagttgtgctgacacagagccctgccatcctgagtgtgtccccaggcgatagagtgatcctgtcctgcagagcctctcagggcctcgattcttctcacctggcctggtacagattcaagcggggacagatccccacactggtcatcttcggcaccagcaacagagccagaggcacccctgatagattttccggctctggcagcggagccgacttcaccctgacaatcagcagagtggaacccgaggacttcgccacctactactgccagagatacggcggcacccctatcacatttggcggcggaaccacactggacaagaaaggtggtggtggttctggcggaggcggaagtggtggcggtgggtccggaggtggtggatctgaacctaagagcagcgacaagacccacacctgtcctccatgtcctgctccagaactgctcggcggaccttccgtgttcctgtttcctccaaagcctaaggacaccctgatgatcagcagaacccctgaagtgacctgcgtggtggtggacgtgtcccacgaagatcccgaagtgaagttcaattggtacgtggacggcgtggaagtgcacaacgccaagaccaagcctagagaggaacagtacaacagcacctacagagtggtgtccgtgctgaccgtgctgcaccaggattggctgaacggcaaagagtacaagtgcaaggtgtccaacaaggccctgcctgctcctatcgagaaaaccatcagcaaggccaagggccagcctagggaaccccaggtttacacactgcctccaagccgggaggagatgaccaagaaccaggtgtccctgacctgcctggtcaagggcttctacccttccgatatcgccgtggaatgggagagcaatggccagcctgagaacaactacaagacaacccctcctgtgctggacagcgacggctcattcttcctgtacagcaagctgacagtggacaagagcagatggcagcagggcaacgtgttcagctgctctgtgctgcacgaagccctgcacagccactacacccagaagtccctgtctctgagccccggcaagtgataa

SEQ ID NO: 655 - RNA, 1596 nt, synthetic construct
  source 1..1596: mol_type = other RNA
atggattggatctggcgcatcctgtttctcgtgggagctgccacaggcgcccattctcaaggcagactgtttcagtctggcgccgaagtgaaaagaccaggcgcctctgtgcggatcagctgcagagctgacgacgacccctacaccgacgacgataccttcaccaagtactggacccactggatcagacaggcccctggacaaagacctgagtggctgggagtgatcagccctcacttcgccagacctatctacagctacaagttccgggacagactgaccctgaccagagacagctctctgaccgccgtgtacctggaactgaagggcctgcagcctgacgacagcggcatctacttttgcgccagagatcccttcggcgacagagcccctcactacaactaccacatggacgtgtggggcggaggcacagccgtgatagtgtcttccggtggcggaggaagcggaggcggaggttcaggcggcggaggctctggcggtggtggatctgaagttgtgctgacacagagccctgccatcctgagtgtgtccccaggcgatagagtgatcctgtcctgcagagcctctcagggcctcgattcttctcacctggcctggtacagattcaagcggggacagatccccacactggtcatcttcggcaccagcaacagagccagaggcacccctgatagattttccggctctggcagcggagccgacttcaccctgacaatcagcagagtggaacccgaggacttcgccacctactactgccagagatacggcggcacccctatcacatttggcggcggaaccacactggacaagaaaggtggtggtggttctggcggaggcggaagtggtggcggtgggtccggaggtggtggatctgaacctaagagcagcgacaagacccacacctgtcctccatgtcctgctccagaactgctcggcggaccttccgtgttcctgtttcctccaaagcctaaggacaccctgatgatcagcagaacccctgaagtgacctgcgtggtggtggacgtgtcccacgaagatcccgaagtgaagttcaattggtacgtggacggcgtggaagtgcacaacgccaagaccaagcctagagaggaacagtacaacagcacctacagagtggtgtccgtgctgaccgtgctgcaccaggattggctgaacggcaaagagtacaagtgcaaggtgtccaacaaggccctgcctgctcctatcgagaaaaccatcagcaaggccaagggccagcctagggaaccccaggtttacacactgcctccaagccgggaggagatgaccaagaaccaggtgtccctgacctgcctggtcaagggcttctacccttccgatatcgccgtggaatgggagagcaatggccagcctgagaacaactacaagacaacccctcctgtgctggacagcgacggctcattcttcctgtacagcaagctgacagtggacaagagcagatggcagcagggcaacgtgttcagctgctctgtgctgcacgaagccctgcacagccactacacccagaagtccctgtctctgagccccggcaagtgataa

SEQ ID NO: 656 - protein, 530 aa, synthetic construct
MDWIWRILFLVGAATGAHSQGRLFQSGAEVKRPGASVRISCRADDDPYTDDDTFTKYWTHWIRQAPGQRPEWLGVISPHFARPIYSYKFRDRLTLTRDSSLTAVYLELKGLQPDDSGIYFCARDPFGDRAPHYNYHMDVWGGGTAVIVSSGGGGSGGGGSGGGGSGGGGSEVVLTQSPAILSVSPGDRVILSCRASQGLDSSHLAWYRFKRGQIPTLVIFGTSNRARGTPDRFSGSGSGADFTLTISRVEPEDFATYYCQRYGGTPITFGGGTTLDKKGGGGSGGGGSGGGGSGGGGSEPKSSDKTHTCPPCPAPELLGGPSVFLFPPKPKDTLMISRTPEVTCVVVDVSHEDPEVKFNWYVDGVEVHNAKTKPREEQYNSTYRVVSVLTVLHQDWLNGKEYKCKVSNKALPAPIEKTISKAKGQPREPQVYTLPPSREEMTKNQVSLTCLVKGFYPSDIAVEWESNGQPENNYKTTPPVLDSDGSFFLYSKLTVDKSRWQQGNVFSCSVLHEALHSHYTQKSLSLSPGK

SEQ ID NO: 657 - DNA, 1611 bp, synthetic construct
  source 1..1611: mol_type = other DNA
atggattggatctggcgcatcctgtttctcgtgggagctgccacaggcgcccattctcaaggcagactgtttcagtctggcgccgaagtgaaaagaccaggcgcctctgtgcggatcagctgcagagctgacgacgacccctacaccgacgacgataccttcaccaagtactggacccactggatcagacaggcccctggacaaagacctgagtggctgggagtgatcagccctcacttcgccagacctatctacagctacaagttccgggacagactgaccctgaccagagacagctctctgaccgccgtgtacctggaactgaagggcctgcagcctgacgacagcggcatctacttttgcgccagagatcccttcggcgacagagcccctcactacaactaccacatggacgtgtggggcggaggcacagccgtgatagtgtcttccggcggcggaggaagcggaggcgggggttctggcggtggtggctctggtggcggaggctcaggcggtggcggatctgaagttgtgctgacacagagccctgccatcctgagtgtgtccccaggcgatagagtgatcctgtcctgcagagcctctcagggcctcgattcttctcacctggcctggtacagattcaagcggggacagatccccacactggtcatcttcggcaccagcaacagagccagaggcacccctgatagattttccggctctggcagcggagccgacttcaccctgacaatcagcagagtggaacccgaggacttcgccacctactactgccagagatacggcggcacccctatcacatttggcggcggaaccacactggacaagaaaggcggaggtggaagtggtggtggcggtagcggaggcggtgggtccggaggtggtggatctgaacctaagagcagcgacaagacccacacctgtcctccatgtcctgctccagaactgctcggcggaccttccgtgttcctgtttcctccaaagcctaaggacaccctgatgatcagcagaacccctgaagtgacctgcgtggtggtggacgtgtcccacgaagatcccgaagtgaagttcaattggtacgtggacggcgtggaagtgcacaacgccaagaccaagcctagagaggaacagtacaacagcacctacagagtggtgtccgtgctgaccgtgctgcaccaggattggctgaacggcaaagagtacaagtgcaaggtgtccaacaaggccctgcctgctcctatcgagaaaaccatcagcaaggccaagggccagcctagggaaccccaggtttacacactgcctccaagccgggaggagatgaccaagaaccaggtgtccctgacctgcctggtcaagggcttctacccttccgatatcgccgtggaatgggagagcaatggccagcctgagaacaactacaagacaacccctcctgtgctggacagcgacggctcattcttcctgtacagcaagctgacagtggacaagagcagatggcagcagggcaacgtgttcagctgctctgtgctgcacgaagccctgcacagccactacacccagaagtccctgtctctgagccccggcaagtgataa

SEQ ID NO: 658 - RNA, 1611 nt, synthetic construct
  source 1..1611: mol_type = other RNA
atggattggatctggcgcatcctgtttctcgtgggagctgccacaggcgcccattctcaaggcagactgtttcagtctggcgccgaagtgaaaagaccaggcgcctctgtgcggatcagctgcagagctgacgacgacccctacaccgacgacgataccttcaccaagtactggacccactggatcagacaggcccctggacaaagacctgagtggctgggagtgatcagccctcacttcgccagacctatctacagctacaagttccgggacagactgaccctgaccagagacagctctctgaccgccgtgtacctggaactgaagggcctgcagcctgacgacagcggcatctacttttgcgccagagatcccttcggcgacagagcccctcactacaactaccacatggacgtgtggggcggaggcacagccgtgatagtgtcttccggcggcggaggaagcggaggcgggggttctggcggtggtggctctggtggcggaggctcaggcggtggcggatctgaagttgtgctgacacagagccctgccatcctgagtgtgtccccaggcgatagagtgatcctgtcctgcagagcctctcagggcctcgattcttctcacctggcctggtacagattcaagcggggacagatccccacactggtcatcttcggcaccagcaacagagccagaggcacccctgatagattttccggctctggcagcggagccgacttcaccctgacaatcagcagagtggaacccgaggacttcgccacctactactgccagagatacggcggcacccctatcacatttggcggcggaaccacactggacaagaaaggcggaggtggaagtggtggtggcggtagcggaggcggtgggtccggaggtggtggatctgaacctaagagcagcgacaagacccacacctgtcctccatgtcctgctccagaactgctcggcggaccttccgtgttcctgtttcctccaaagcctaaggacaccctgatgatcagcagaacccctgaagtgacctgcgtggtggtggacgtgtcccacgaagatcccgaagtgaagttcaattggtacgtggacggcgtggaagtgcacaacgccaagaccaagcctagagaggaacagtacaacagcacctacagagtggtgtccgtgctgaccgtgctgcaccaggattggctgaacggcaaagagtacaagtgcaaggtgtccaacaaggccctgcctgctcctatcgagaaaaccatcagcaaggccaagggccagcctagggaaccccaggtttacacactgcctccaagccgggaggagatgaccaagaaccaggtgtccctgacctgcctggtcaagggcttctacccttccgatatcgccgtggaatgggagagcaatggccagcctgagaacaactacaagacaacccctcctgtgctggacagcgacggctcattcttcctgtacagcaagctgacagtggacaagagcagatggcagcagggcaacgtgttcagctgctctgtgctgcacgaagccctgcacagccactacacccagaagtccctgtctctgagccccggcaagtgataa

SEQ ID NO: 659 - protein, 535 aa, synthetic construct
MDWIWRILFLVGAATGAHSQGRLFQSGAEVKRPGASVRISCRADDDPYTDDDTFTKYWTHWIRQAPGQRPEWLGVISPHFARPIYSYKFRDRLTLTRDSSLTAVYLELKGLQPDDSGIYFCARDPFGDRAPHYNYHMDVWGGGTAVIVSSGGGGSGGGGSGGGGSGGGGSGGGGSEVVLTQSPAILSVSPGDRVILSCRASQGLDSSHLAWYRFKRGQIPTLVIFGTSNRARGTPDRFSGSGSGADFTLTISRVEPEDFATYYCQRYGGTPITFGGGTTLDKKGGGGSGGGGSGGGGSGGGGSEPKSSDKTHTCPPCPAPELLGGPSVFLFPPKPKDTLMISRTPEVTCVVVDVSHEDPEVKFNWYVDGVEVHNAKTKPREEQYNSTYRVVSVLTVLHQDWLNGKEYKCKVSNKALPAPIEKTISKAKGQPREPQVYTLPPSREEMTKNQVSLTCLVKGFYPSDIAVEWESNGQPENNYKTTPPVLDSDGSFFLYSKLTVDKSRWQQGNVFSCSVLHEALHSHYTQKSLSLSPGK

SEQ ID NO: 660 - DNA, 1596 bp, synthetic construct
  source 1..1596: mol_type = other DNA
atggattggatctggcgcatcctgtttctcgtgggagctgccacaggcgcccattctgaagtggtgctgacacagagccccgccatcctgagtgttagccctggcgatagagtgatcctgagctgcagagcctctcagggcctcgattcttctcacctggcctggtacagattcaagcggggacagatccccacactggtcatcttcggcaccagcaacagagccagaggcacccctgatagattttccggctctggcagcggagccgacttcaccctgacaatcagcagagtggaacccgaggacttcgccacctactactgccagagatacggcggcacccctatcacatttggcggcggaaccacactggacaagaaaggcggcggaggaagcggaggcggaggttctggtggcggaggctcaggcggtggcggatctcaaggcagactgtttcagtctggcgccgaagtgaaaagaccaggcgcctctgtgcggatcagctgtagagccgacgacgacccctacaccgacgatgacaccttcaccaagtactggacccactggatcagacaggcccctggacaaagacctgagtggctgggagtgatcagccctcacttcgccagacctatctacagctacaagttccgggacagactgaccctgaccagagacagctctctgaccgccgtgtacctggaactgaagggcctgcagcctgacgacagcggcatctacttttgcgccagagatcccttcggcgacagggctccccactacaactaccacatggatgtgtggggaggcggcacagccgtgattgtgtcttccggcggaggtggaagtggtggtggcggtagcggaggcggtgggtccggaggtggtggatctgaacctaagagcagcgacaagacccacacctgtcctccatgtcctgctccagaactgctcggcggaccttccgtgttcctgtttcctccaaagcctaaggacaccctgatgatcagcagaacccctgaagtgacctgcgtggtggtggacgtgtcccacgaagatcccgaagtgaagttcaattggtacgtggacggcgtggaagtgcacaacgccaagaccaagcctagagaggaacagtacaacagcacctacagagtggtgtccgtgctgaccgtgctgcaccaggattggctgaacggcaaagagtacaagtgcaaggtgtccaacaaggccctgcctgctcctatcgagaaaaccatcagcaaggccaagggccagcctagggaaccccaggtttacacactgcctccaagccgggaggagatgaccaagaaccaggtgtccctgacctgcctggtcaagggcttctacccttccgatatcgccgtggaatgggagagcaatggccagcctgagaacaactacaagacaacccctcctgtgctggacagcgacggctcattcttcctgtacagcaagctgacagtggacaagagcagatggcagcagggcaacgtgttcagctgctctgtgctgcacgaagccctgcacagccactacacccagaagtccctgtctctgagccccggcaagtgataa

SEQ ID NO: 661 - RNA, 1596 nt, synthetic construct
  source 1..1596: mol_type = other RNA
atggattggatctggcgcatcctgtttctcgtgggagctgccacaggcgcccattctgaagtggtgctgacacagagccccgccatcctgagtgttagccctggcgatagagtgatcctgagctgcagagcctctcagggcctcgattcttctcacctggcctggtacagattcaagcggggacagatccccacactggtcatcttcggcaccagcaacagagccagaggcacccctgatagattttccggctctggcagcggagccgacttcaccctgacaatcagcagagtggaacccgaggacttcgccacctactactgccagagatacggcggcacccctatcacatttggcggcggaaccacactggacaagaaaggcggcggaggaagcggaggcggaggttctggtggcggaggctcaggcggtggcggatctcaaggcagactgtttcagtctggcgccgaagtgaaaagaccaggcgcctctgtgcggatcagctgtagagccgacgacgacccctacaccgacgatgacaccttcaccaagtactggacccactggatcagacaggcccctggacaaagacctgagtggctgggagtgatcagccctcacttcgccagacctatctacagctacaagttccgggacagactgaccctgaccagagacagctctctgaccgccgtgtacctggaactgaagggcctgcagcctgacgacagcggcatctacttttgcgccagagatcccttcggcgacagggctccccactacaactaccacatggatgtgtggggaggcggcacagccgtgattgtgtcttccggcggaggtggaagtggtggtggcggtagcggaggcggtgggtccggaggtggtggatctgaacctaagagcagcgacaagacccacacctgtcctccatgtcctgctccagaactgctcggcggaccttccgtgttcctgtttcctccaaagcctaaggacaccctgatgatcagcagaacccctgaagtgacctgcgtggtggtggacgtgtcccacgaagatcccgaagtgaagttcaattggtacgtggacggcgtggaagtgcacaacgccaagaccaagcctagagaggaacagtacaacagcacctacagagtggtgtccgtgctgaccgtgctgcaccaggattggctgaacggcaaagagtacaagtgcaaggtgtccaacaaggccctgcctgctcctatcgagaaaaccatcagcaaggccaagggccagcctagggaaccccaggtttacacactgcctccaagccgggaggagatgaccaagaaccaggtgtccctgacctgcctggtcaagggcttctacccttccgatatcgccgtggaatgggagagcaatggccagcctgagaacaactacaagacaacccctcctgtgctggacagcgacggctcattcttcctgtacagcaagctgacagtggacaagagcagatggcagcagggcaacgtgttcagctgctctgtgctgcacgaagccctgcacagccactacacccagaagtccctgtctctgagccccggcaagtgataa

SEQ ID NO: 662 - protein, 530 aa, synthetic construct
MDWIWRILFLVGAATGAHSEVVLTQSPAILSVSPGDRVILSCRASQGLDSSHLAWYRFKRGQIPTLVIFGTSNRARGTPDRFSGSGSGADFTLTISRVEPEDFATYYCQRYGGTPITFGGGTTLDKKGGGGSGGGGSGGGGSGGGGSQGRLFQSGAEVKRPGASVRISCRADDDPYTDDDTFTKYWTHWIRQAPGQRPEWLGVISPHFARPIYSYKFRDRLTLTRDSSLTAVYLELKGLQPDDSGIYFCARDPFGDRAPHYNYHMDVWGGGTAVIVSSGGGGSGGGGSGGGGSGGGGSEPKSSDKTHTCPPCPAPELLGGPSVFLFPPKPKDTLMISRTPEVTCVVVDVSHEDPEVKFNWYVDGVEVHNAKTKPREEQYNSTYRVVSVLTVLHQDWLNGKEYKCKVSNKALPAPIEKTISKAKGQPREPQVYTLPPSREEMTKNQVSLTCLVKGFYPSDIAVEWESNGQPENNYKTTPPVLDSDGSFFLYSKLTVDKSRWQQGNVFSCSVLHEALHSHYTQKSLSLSPGK

SEQ ID NO: 663 - DNA, 1611 bp, synthetic construct
  source 1..1611: mol_type = other DNA
atggattggatctggcgcatcctgtttctcgtgggagctgccacaggcgcccattctgaagtggtgctgacacagagccccgccatcctgagtgttagccctggcgatagagtgatcctgagctgcagagcctctcagggcctcgattcttctcacctggcctggtacagattcaagcggggacagatccccacactggtcatcttcggcaccagcaacagagccagaggcacccctgatagattttccggctctggcagcggagccgacttcaccctgacaatcagcagagtggaacccgaggacttcgccacctactactgccagagatacggcggcacccctatcacatttggcggcggaaccacactggacaagaaaggcggcggaggaagcggaggcggaggttctggtggtggtggctctggtggcggaggctcaggcggtggcggatctcaaggcagactgtttcagtctggcgccgaagtgaaaagaccaggcgcctctgtgcggatcagctgtagagccgacgacgacccctacaccgacgatgacaccttcaccaagtactggacccactggatcagacaggcccctggacaaagacctgagtggctgggagtgatcagccctcacttcgccagacctatctacagctacaagttccgggacagactgaccctgaccagagacagctctctgaccgccgtgtacctggaactgaagggcctgcagcctgacgacagcggcatctacttttgcgccagagatcccttcggcgacagggctccccactacaactaccacatggatgtgtggggaggcggcacagccgtgattgtgtcttccggcggaggtggaagtggtggtggcggtagcggaggcggtgggtccggaggtggtggatctgaacctaagagcagcgacaagacccacacctgtcctccatgtcctgctccagaactgctcggcggaccttccgtgttcctgtttcctccaaagcctaaggacaccctgatgatcagcagaacccctgaagtgacctgcgtggtggtggacgtgtcccacgaagatcccgaagtgaagttcaattggtacgtggacggcgtggaagtgcacaacgccaagaccaagcctagagaggaacagtacaacagcacctacagagtggtgtccgtgctgaccgtgctgcaccaggattggctgaacggcaaagagtacaagtgcaaggtgtccaacaaggccctgcctgctcctatcgagaaaaccatcagcaaggccaagggccagcctagggaaccccaggtttacacactgcctccaagccgggaggagatgaccaagaaccaggtgtccctgacctgcctggtcaagggcttctacccttccgatatcgccgtggaatgggagagcaatggccagcctgagaacaactacaagacaacccctcctgtgctggacagcgacggctcattcttcctgtacagcaagctgacagtggacaagagcagatggcagcagggcaacgtgttcagctgctctgtgctgcacgaagccctgcacagccactacacccagaagtccctgtctctgagccccggcaagtgataa

SEQ ID NO: 664 - RNA, 1611 nt, synthetic construct
  source 1..1611: mol_type = other RNA
atggattggatctggcgcatcctgtttctcgtgggagctgccacaggcgcccattctgaagtggtgctgacacagagccccgccatcctgagtgttagccctggcgatagagtgatcctgagctgcagagcctctcagggcctcgattcttctcacctggcctggtacagattcaagcggggacagatccccacactggtcatcttcggcaccagcaacagagccagaggcacccctgatagattttccggctctggcagcggagccgacttcaccctgacaatcagcagagtggaacccgaggacttcgccacctactactgccagagatacggcggcacccctatcacatttggcggcggaaccacactggacaagaaaggcggcggaggaagcggaggcggaggttctggtggtggtggctctggtggcggaggctcaggcggtggcggatctcaaggcagactgtttcagtctggcgccgaagtgaaaagaccaggcgcctctgtgcggatcagctgtagagccgacgacgacccctacaccgacgatgacaccttcaccaagtactggacccactggatcagacaggcccctggacaaagacctgagtggctgggagtgatcagccctcacttcgccagacctatctacagctacaagttccgggacagactgaccctgaccagagacagctctctgaccgccgtgtacctggaactgaagggcctgcagcctgacgacagcggcatctacttttgcgccagagatcccttcggcgacagggctccccactacaactaccacatggatgtgtggggaggcggcacagccgtgattgtgtcttccggcggaggtggaagtggtggtggcggtagcggaggcggtgggtccggaggtggtggatctgaacctaagagcagcgacaagacccacacctgtcctccatgtcctgctccagaactgctcggcggaccttccgtgttcctgtttcctccaaagcctaaggacaccctgatgatcagcagaacccctgaagtgacctgcgtggtggtggacgtgtcccacgaagatcccgaagtgaagttcaattggtacgtggacggcgtggaagtgcacaacgccaagaccaagcctagagaggaacagtacaacagcacctacagagtggtgtccgtgctgaccgtgctgcaccaggattggctgaacggcaaagagtacaagtgcaaggtgtccaacaaggccctgcctgctcctatcgagaaaaccatcagcaaggccaagggccagcctagggaaccccaggtttacacactgcctccaagccgggaggagatgaccaagaaccaggtgtccctgacctgcctggtcaagggcttctacccttccgatatcgccgtggaatgggagagcaatggccagcctgagaacaactacaagacaacccctcctgtgctggacagcgacggctcattcttcctgtacagcaagctgacagtggacaagagcagatggcagcagggcaacgtgttcagctgctctgtgctgcacgaagccctgcacagccactacacccagaagtccctgtctctgagccccggcaagtgataa

SEQ ID NO: 665 - protein, 535 aa, synthetic construct
MDWIWRILFLVGAATGAHSEVVLTQSPAILSVSPGDRVILSCRASQGLDSSHLAWYRFKRGQIPTLVIFGTSNRARGTPDRFSGSGSGADFTLTISRVEPEDFATYYCQRYGGTPITFGGGTTLDKKGGGGSGGGGSGGGGSGGGGSGGGGSQGRLFQSGAEVKRPGASVRISCRADDDPYTDDDTFTKYWTHWIRQAPGQRPEWLGVISPHFARPIYSYKFRDRLTLTRDSSLTAVYLELKGLQPDDSGIYFCARDPFGDRAPHYNYHMDVWGGGTAVIVSSGGGGSGGGGSGGGGSGGGGSEPKSSDKTHTCPPCPAPELLGGPSVFLFPPKPKDTLMISRTPEVTCVVVDVSHEDPEVKFNWYVDGVEVHNAKTKPREEQYNSTYRVVSVLTVLHQDWLNGKEYKCKVSNKALPAPIEKTISKAKGQPREPQVYTLPPSREEMTKNQVSLTCLVKGFYPSDIAVEWESNGQPENNYKTTPPVLDSDGSFFLYSKLTVDKSRWQQGNVFSCSVLHEALHSHYTQKSLSLSPGK

SEQ ID NO: 666 - DNA, 708 bp, synthetic construct; identical to SEQ ID NO: 597
  source 1..708: mol_type = other DNA

SEQ ID NO: 667 - RNA, 708 nt, synthetic construct; identical to SEQ ID NO: 453
  source 1..708: mol_type = other RNA

SEQ ID NO: 668 - protein, 234 aa, synthetic construct
MDWIWRILFLVGAATGAHSEVVLTQSPAILSVSPGDRVILSCRASQGLDSSHLAWYRFKRGQIPTLVIFGTSNRARGTPDRFSGSGSGADFTLTISRVEPEDFATYYCQRYGGTPITFGGGTTLDKKRTVAAPSVFIFPPSDRKLKSGTASVVCLLNNFYPREAKVQWKVDNALQSGNSQESVTEQDSKDSTYSLSSTLTLSKADYEKHKVYACEVTHQGLSSPVTKSFNRGEC

SEQ ID NO: 669 - RNA, 1907 nt, synthetic construct
  source 1..1907: mol_type = other RNA
agaataaactagtattcttctggtccccacagactcagagagaacccgccaccatggattggatttggagaatcctgttcctcgtgggcgccgctaccggagcccactcccagggcagactgtttcagtctggcgccgaagtgaaaagaccaggcgcctctgtgcggatcagctgcagagctgacgacgacccctacaccgacgacgataccttcaccaagtactggacccactggatcagacaggcccctggacaaagacctgagtggctgggagtgatcagccctcacttcgccagacctatctacagctacaagttccgggacagactgaccctgaccagagacagctctctgaccgccgtgtacctggaactgaagggcctgcagcctgacgacagcggcatctacttttgcgccagagatcccttcggcgacagagcccctcactacaactaccacatggacgtgtggggcggaggcacagccgtgatagttagcagcgcctctacaaagggccctagcgtgttccctctggctcctagcagcaagtcgacatctggcggaacagccgctctgggctgtctggtcaaggactactttcccgagcctgtgacagtgtcctggaactctggcgctctgacaagcggcgtgcacacatttccagccgtgctgcaaagcagcggcctgtactctctgagcagcgtggtcacagtgccaagctctagcctgggcacccagacctacatctgcaatgtgaaccacaagcctagcaacaccaaggtggacaagagagtggaacccaagagctgcgacaagacccacacctgtcctccatgtcctgctccagaactgctggccggaccttccgtgttcctgtttcctccaaagcctaaggacaccctgatgatcagcagaacccctgaagtgacctgcgtggtggtggatgtgtctcacgaggaccctgaagtgaagttcaattggtacgtggacggcgtggaagtgcacaacgccaagaccaagcctagagaggaacagtacaacagcacctacagagtggtgtccgtgctgaccgtgctgcaccaggattggctgaacggcaaagagtacaagtgcaaggtgtccaacaaggccctgcctgcccctgaggaaaagaccatcagcaaggccaagggccagcctagggaaccccaggtttacacactgcctccaagccgcgaggaaatgaccaagaaccaggtgtccctgacctgcctcgtgaagggcttctacccttccgatatcgccgtggaatgggagagcaatggccagcctgagaacaactacaagacaacccctcctgtgctggacagcgacggctcattcttcctgtacagcaagctgaccgtggacaagtccagatggcagcagggcaacgtgttcagctgtagcgtgctgcacgaagccctgcacagccactacacccagaaaagcctgtctctgagccccggcaaatgataaggatccgatctggtactgcatgcacgcaatgctagctgcccctttcccgtcctgggtaccccgagtctcccccgacctcgggtcccaggtatgctcccacctccacctgccccactcaccacctctgctagttccagacacctcccaagcacgcagcaatgcagctcaaaacgcttagcctagccacacccccacgggaaacagcagtgattaacctttagcaataaacgaaagtttaactaagctatactaaccccagggttggtcaatttcgtgccagccacaccctcgagctagcaaaaaaaaaaaaaaaaaaaaaaaaaaaaaagcatatgactaaaaaaaaaaaaaaaaaaaaaaaaaaaaaaaaaaaaaaaaaaaaaaaaaaaaaaaaaaaaaaaaaaaaaa

SEQ ID NO: 670 - RNA, 1907 nt, synthetic construct
  source 1..1907: mol_type = other RNA
agaataaactagtattcttctggtccccacagactcagagagaacccgccaccatggattggatttggagaatcctgttcctcgtgggcgccgctaccggagcccactcccagggcagactgtttcagtctggcgccgaagtgaaaagaccaggcgcctctgtgcggatcagctgcagagctgacgacgacccctacaccgacgacgataccttcaccaagtactggacccactggatcagacaggcccctggacaaagacctgagtggctgggagtgatcagccctcacttcgccagacctatctacagctacaagttccgggacagactgaccctgaccagagacagctctctgaccgccgtgtacctggaactgaagggcctgcagcctgacgacagcggcatctacttttgcgccagagatcccttcggcgacagagcccctcactacaactaccacatggacgtgtggggcggaggcacagccgtgatagttagcagcgcctctacaaagggccctagcgtgttccctctggctcctagcagcaagtcgacatctggcggaacagccgctctgggctgtctggtcaaggactactttcccgagcctgtgacagtgtcctggaactctggcgctctgacaagcggcgtgcacacatttccagccgtgctgcaaagcagcggcctgtactctctgagcagcgtggtcacagtgccaagctctagcctgggcacccagacctacatctgcaatgtgaaccacaagcctagcaacaccaaggtggacaagaaggtggaacccaagagctgcgacaagacccacacctgtcctccatgtcctgctccagaactgctcggcggaccttccgtgttcctgtttcctccaaagcctaaggacaccctgatgatcagcagaacccctgaagtgacctgcgtggtggtggatgtgtctcacgaggacccagaagtgaagttcaattggtacgtggacggcgtggaagtgcacaacgccaagaccaagcctagagaggaacagtacaacagcacctacagagtggtgtccgtgctgacagtgctgcaccaggattggctgaacggcaaagagtacaagtgcaaggtgtccaacaaggccctgcctgctcctatcgagaaaaccatcagcaaggccaagggccagcctagggaaccccaggtttacacactgcctccaagccgcgaggaaatgaccaagaaccaggtgtccctgacctgcctcgtgaagggcttctacccttccgatatcgccgtggaatgggagagcaatggccagcctgagaacaactacaagacaacccctcctgtgctggacagcgacggctcattcttcctgtacagcaagctgactgtggataagtcccggtggcagcagggcaacgtgttcagctgttctgtgatgcacgaagccctgcacaaccactacacccagaaaagcctgtctctgagccccggcaagtgataaggatccgatctggtactgcatgcacgcaatgctagctgcccctttcccgtcctgggtaccccgagtctcccccgacctcgggtcccaggtatgctcccacctccacctgccccactcaccacctctgctagttccagacacctcccaagcacgcagcaatgcagctcaaaacgcttagcctagccacacccccacgggaaacagcagtgattaacctttagcaataaacgaaagtttaactaagctatactaaccccagggttggtcaatttcgtgccagccacaccctcgagctagcaaaaaaaaaaaaaaaaaaaaaaaaaaaaaagcatatgactaaaaaaaaaaaaaaaaaaaaaaaaaaaaaaaaaaaaaaaaaaaaaaaaaaaaaaaaaaaaaaaaaaaaaa

SEQ ID NO: 671 - RNA, 1907 nt, synthetic construct
  source 1..1907: mol_type = other RNA
agaataaactagtattcttctggtccccacagactcagagagaacccgccaccatggattggatttggagaatcctgttcctcgtgggcgccgctaccggagcccactcccagggcagactgtttcagtctggcgccgaagtgaaaagaccaggcgcctctgtgcggatcagctgcagagctgacgacgacccctacaccgacgacgataccttcaccaagtactggacccactggatcagacaggcccctggacaaagacctgagtggctgggagtgatcagccctcacttcgccagacctatctacagctacaagttccgggacagactgaccctgaccagagacagctctctgaccgccgtgtacctggaactgaagggcctgcagcctgacgacagcggcatctacttttgcgccagagatcccttcggcgacagagcccctcactacaactaccacatggacgtgtggggcggaggcacagccgtgatagttagcagcgcctctacaaagggccctagcgtgttccctctggctcctagcagcaagtcgacatctggcggaacagccgctctgggctgtctggtcaaggactactttcccgagcctgtgacagtgtcctggaactctggcgctctgacaagcggcgtgcacacatttccagccgtgctgcaaagcagcggcctgtactctctgagcagcgtggtcacagtgccaagctctagcctgggcacccagacctacatctgcaatgtgaaccacaagcctagcaacaccaaggtggacaagaaggtggaacccaagagctgcgacaagacccacacctgtcctccatgtcctgctccagaactgctcggcggaccttccgtgttcctgtttcctccaaagcctaaggacaccctgatgatcagcagaacccctgaagtgacctgcgtggtggtggatgtgtctcacgaggacccagaagtgaagttcaattggtacgtggacggcgtggaagtgcacaacgccaagaccaagcctagagaggaacagtacaacagcacctacagagtggtgtccgtgctgacagtgctgcaccaggattggctgaacggcaaagagtacaagtgcaaggtgtccaacaaggccctgcctgctcctatcgagaaaaccatcagcaaggccaagggccagcctagggaaccccaggtttacacactgcctccaagccgcgaggaaatgaccaagaaccaggtgtccctgacctgcctcgtgaagggcttctacccttccgatatcgccgtggaatgggagagcaatggccagcctgagaacaactacaagacaacccctcctgtgctggacagcgacggctcattcttcctgtacagcaagctgaccgtggacaagtccagatggcagcagggcaacgtgttcagctgtagcgtgctgcacgaagccctgcacagccactacacccagaaaagcctgtctctgagccccggcaaatgataaggatccgatctggtactgcatgcacgcaatgctagctgcccctttcccgtcctgggtaccccgagtctcccccgacctcgggtcccaggtatgctcccacctccacctgccccactcaccacctctgctagttccagacacctcccaagcacgcagcaatgcagctcaaaacgcttagcctagccacacccccacgggaaacagcagtgattaacctttagcaataaacgaaagtttaactaagctatactaaccccagggttggtcaatttcgtgccagccacaccctcgagctagcaaaaaaaaaaaaaaaaaaaaaaaaaaaaaagcatatgactaaaaaaaaaaaaaaaaaaaaaaaaaaaaaaaaaaaaaaaaaaaaaaaaaaaaaaaaaaaaaaaaaaaaaa

SEQ ID NO: 672 - RNA, 1907 nt, synthetic construct
  source 1..1907: mol_type = other RNA
agaataaactagtattcttctggtccccacagactcagagagaacccgccaccatggattggatttggagaatcctgttcctcgtgggcgccgctaccggagcccactcccagggcagactgtttcagtctggcgccgaagtgaaaagaccaggcgcctctgtgcggatcagctgcagagctgacgacgacccctacaccgacgacgataccttcaccaagtactggacccactggatcagacaggcccctggacaaagacctgagtggctgggagtgatcagccctcacttcgccagacctatctacagctacaagttccgggacagactgaccctgaccagagacagctctctgaccgccgtgtacctggaactgaagggcctgcagcctgacgacagcggcatctacttttgcgccagagatcccttcggcgacagagcccctcactacaactaccacatggacgtgtggggcggaggcacagccgtgatagttagcagcgcctctacaaagggccctagcgtgttccctctggctcctagcagcaagtcgacatctggcggaacagccgctctgggctgtctggtcaaggactactttcccgagcctgtgacagtgtcctggaactctggcgctctgacaagcggcgtgcacacatttccagccgtgctgcaaagcagcggcctgtactctctgagcagcgtggtcacagtgccaagctctagcctgggcacccagacctacatctgcaatgtgaaccacaagcctagcaacaccaaggtggacaagaaggtggaacccaagagctgcgacaagacccacacctgtcctccatgtcctgctccagaactgctcggcggaccttccgtgttcctgtttcctccaaagcctaaggacaccctgatgatcagcagaacccctgaagtgacctgcgtggtggtggatgtgtctcacgaggacccagaagtgaagttcaattggtacgtggacggcgtggaagtgcacaacgccaagaccaagcctagagaggaacagtacaacagcacctacagagtggtgtccgtgctgacagtgctgcaccaggattggctgaacggcaaagagtacaagtgcaaggtgtccaacaaggccctgcctgctcctatcgagaaaaccatcagcaaggccaagggccagcctagggaaccccaggtttacaccctgcctccatgccgcgaggaaatgaccaagaaccaggtgtccctgtggtgcctggtcaagggcttctacccttccgatatcgccgtggaatgggagagcaatggccagcctgagaacaactacaagacaacccctcctgtgctggacagcgacggctcattcttcctgtacagcaagctgacagtggacaagagcagatggcagcagggcaacgtgttcagctgcagcgtgctgcatgaagccctgcacagccactacacccagaagtccctgtctctgagccccggcaagtgataaggatccgatctggtactgcatgcacgcaatgctagctgcccctttcccgtcctgggtaccccgagtctcccccgacctcgggtcccaggtatgctcccacctccacctgccccactcaccacctctgctagttccagacacctcccaagcacgcagcaatgcagctcaaaacgcttagcctagccacacccccacgggaaacagcagtgattaacctttagcaataaacgaaagtttaactaagctatactaaccccagggttggtcaatttcgtgccagccacaccctcgagctagcaaaaaaaaaaaaaaaaaaaaaaaaaaaaaagcatatgactaaaaaaaaaaaaaaaaaaaaaaaaaaaaaaaaaaaaaaaaaaaaaaaaaaaaaaaaaaaaaaaaaaaaaa

SEQ ID NO: 673 - RNA, 1907 nt, synthetic construct
  source 1..1907: mol_type = other RNA
agaataaactagtattcttctggtccccacagactcagagagaacccgccaccatggattggatttggagaatcctgttcctcgtgggcgccgctaccggagcccactcccagggcagactgtttcagtctggcgccgaagtgaaaagaccaggcgcctctgtgcggatcagctgcagagctgacgacgacccctacaccgacgacgataccttcaccaagtactggacccactggatcagacaggcccctggacaaagacctgagtggctgggagtgatcagccctcacttcgccagacctatctacagctacaagttccgggacagactgaccctgaccagagacagctctctgaccgccgtgtacctggaactgaagggcctgcagcctgacgacagcggcatctacttttgcgccagagatcccttcggcgacagagcccctcactacaactaccacatggacgtgtggggcggaggcacagccgtgatagttagcagcgcctctacaaagggccctagcgtgttccctctggctcctagcagcaagtcgacatctggcggaacagccgctctgggctgtctggtcaaggactactttcccgagcctgtgacagtgtcctggaactctggcgctctgacaagcggcgtgcacacatttccagccgtgctgcaaagcagcggcctgtactctctgagcagcgtggtcacagtgccaagctctagcctgggcacccagacctacatctgcaatgtgaaccacaagcctagcaacaccaaggtggacaagaaggtggaacccaagagctgcgacaagacccacacctgtcctccatgtcctgctccagaactgctggccggaccttccgtgttcctgtttcctccaaagcctaaggacaccctgatgatcagcagaacccctgaagtgacctgcgtggtggtggatgtgtctcacgaggaccctgaagtgaagttcaattggtacgtggacggcgtggaagtgcacaacgccaagaccaagcctagagaggaacagtacaacagcacctacagagtggtgtccgtgctgaccgtgctgcaccaggattggctgaacggcaaagagtacaagtgcaaggtgtccaacaaggccctgcctctgcctgaggaaaagaccatcagcaaggccaagggccagcctagggaaccccaggtttacacactgcctccaagccgcgaggaaatgaccaagaaccaggtgtccctgacctgcctcgtgaagggcttctacccttccgatatcgccgtggaatgggagagcaatggccagcctgagaacaactacaagacaacccctcctgtgctggacagcgacggctcattcttcctgtacagcaagctgaccgtggacaagtccagatggcagcagggcaacgtgttcagctgtagcgtgctgcacgaagccctgcacagccactacacccagaaaagcctgtctctgagccccggcaaatgataaggatccgatctggtactgcatgcacgcaatgctagctgcccctttcccgtcctgggtaccccgagtctcccccgacctcgggtcccaggtatgctcccacctccacctgccccactcaccacctctgctagttccagacacctcccaagcacgcagcaatgcagctcaaaacgcttagcctagccacacccccacgggaaacagcagtgattaacctttagcaataaacgaaagtttaactaagctatactaaccccagggttggtcaatttcgtgccagccacaccctcgagctagcaaaaaaaaaaaaaaaaaaaaaaaaaaaaaagcatatgactaaaaaaaaaaaaaaaaaaaaaaaaaaaaaaaaaaaaaaaaaaaaaaaaaaaaaaaaaaaaaaaaaaaaaa

SEQ ID NO: 674 - RNA, 1907 nt, synthetic construct
  source 1..1907: mol_type = other RNA
agaataaactagtattcttctggtccccacagactcagagagaacccgccaccatggattggatttggagaatcctgttcctcgtgggcgccgctaccggagcccactcccagggcagactgtttcagtctggcgccgaagtgaaaagaccaggcgcctctgtgcggatcagctgcagagctgacgacgacccctacaccgacgacgataccttcaccaagtactggacccactggatcagacaggcccctggacaaagacctgagtggctgggagtgatcagccctcacttcgccagacctatctacagctacaagttccgggacagactgaccctgaccagagacagctctctgaccgccgtgtacctggaactgaagggcctgcagcctgacgacagcggcatctacttttgcgccagagatcccttcggcgacagagcccctcactacaactaccacatggacgtgtggggcggaggcacagccgtgatagttagcagcgcctctacaaagggccctagcgtgttccctctggctcctagcagcaagtcgacatctggcggaacagccgctctgggctgtctggtcaaggactactttcccgagcctgtgacagtgtcctggaactctggcgctctgacaagcggcgtgcacacatttccagccgtgctgcaaagcagcggcctgtactctctgagcagcgtggtcacagtgccaagctctagcctgggcacccagacctacatctgcaatgtgaaccacaagcctagcaacaccaaggtggacaagaaggtggaacccaagagctgcgacaagacccacacctgtcctccatgtcctgctccagaactgctggccggaccttccgtgttcctgtttcctccaaagcctaaggacaccctgatgatcagcagaacccctgaagtgacctgcgtggtggtggatgtgtctcacgaggaccctgaagtgaagttcaattggtacgtggacggcgtggaagtgcacaacgccaagaccaagcctagagaggaacagtacaacagcacctacagagtggtgtccgtgctgaccgtgctgcaccaggattggctgaacggcaaagagtacaagtgcaaggtgtccaacaaggccctgcctgcccctgaggaaaagaccatcagcaaggccaagggccagcctagggaaccccaggtttacacactgcctccaagccgcgaggaaatgaccaagaaccaggtgtccctgacctgcctcgtgaagggcttctacccttccgatatcgccgtggaatgggagagcaatggccagcctgagaacaactacaagacaacccctcctgtgctggacagcgacggctcattcttcctgtacagcaagctgaccgtggacaagtccagatggcagcagggcaacgtgttcagctgtagcgtgctgcacgaagccctgcacagccactacacccagaaaagcctgtctctgagccccggcaaatgataaggatccgatctggtactgcatgcacgcaatgctagctgcccctttcccgtcctgggtaccccgagtctcccccgacctcgggtcccaggtatgctcccacctccacctgccccactcaccacctctgctagttccagacacctcccaagcacgcagcaatgcagctcaaaacgcttagcctagccacacccccacgggaaacagcagtgattaacctttagcaataaacgaaagtttaactaagctatactaaccccagggttggtcaatttcgtgccagccacaccctcgagctagcaaaaaaaaaaaaaaaaaaaaaaaaaaaaaagcatatgactaaaaaaaaaaaaaaaaaaaaaaaaaaaaaaaaaaaaaaaaaaaaaaaaaaaaaaaaaaaaaaaaaaaaaa

SEQ ID NO: 675 - RNA, 1907 nt, synthetic construct
  source 1..1907: mol_type = other RNA
agaataaactagtattcttctggtccccacagactcagagagaacccgccaccatggattggatttggagaatcctgttcctcgtgggcgccgctaccggagcccactcccagggcagactgtttcagtctggcgccgaagtgaaaagaccaggcgcctctgtgcggatcagctgcagagctgacgacgacccctacaccgacgacgataccttcaccaagtactggacccactggatcagacaggcccctggacaaagacctgagtggctgggagtgatcagccctcacttcgccagacctatctacagctacaagttccgggacagactgaccctgaccagagacagctctctgaccgccgtgtacctggaactgaagggcctgcagcctgacgacagcggcatctacttttgcgccagagatcccttcggcgacagagcccctcactacaactaccacatggacgtgtggggcggaggcacagccgtgatagttagcagcgcctctacaaagggccctagcgtgttccctctggctcctagcagcaagtcgacatctggcggaacagccgctctgggctgtctggtcaaggactactttcccgagcctgtgacagtgtcctggaactctggcgctctgacaagcggcgtgcacacatttccagccgtgctgcaaagcagcggcctgtactctctgagcagcgtggtcacagtgccaagctctagcctgggcacccagacctacatctgcaatgtgaaccacaagcctagcaacaccaaggtggacaagaaggtggaacccaagagctgcgacaagacccacacctgtcctccatgtcctgctccagaactgctcggcggaccttccgtgttcctgtttcctccaaagcctaaggacaccctgatgatcagcagaacccctgaagtgacctgcgtggtggtggatgtgtctcacgaggacccagaagtgaagttcaattggtacgtggacggcgtggaagtgcacaacgccaagaccaagcctagagaggaacagtacaacagcacctacagagtggtgtccgtgctgacagtgctgcaccaggattggctgaacggcaaagagtacaagtgcaaggtgtccaacaaggccctgcctgctcctatcgagaaaaccatcagcaaggccaagggccagcctagggaaccccaggtttacacactgcctccaagccgcgacgaactgaccaagaaccaggtgtccctgacctgcctcgtgaagggcttctacccttccgatatcgccgtggaatgggagagcaatggccagcctgagaacaactacaagacaacccctcctgtgctggacagcgacggctcattcttcctgtacagcaagctgactgtggataagtcccggtggcagcagggcaacgtgttcagctgttctgtgatgcacgaagccctgcacaaccactacacccagaaaagcctgtctctgagccccggcaagtgataaggatccgatctggtactgcatgcacgcaatgctagctgcccctttcccgtcctgggtaccccgagtctcccccgacctcgggtcccaggtatgctcccacctccacctgccccactcaccacctctgctagttccagacacctcccaagcacgcagcaatgcagctcaaaacgcttagcctagccacacccccacgggaaacagcagtgattaacctttagcaataaacgaaagtttaactaagctatactaaccccagggttggtcaatttcgtgccagccacaccctcgagctagcaaaaaaaaaaaaaaaaaaaaaaaaaaaaaagcatatgactaaaaaaaaaaaaaaaaaaaaaaaaaaaaaaaaaaaaaaaaaaaaaaaaaaaaaaaaaaaaaaaaaaaaaa

SEQ ID NO: 676 - RNA, 1907 nt, synthetic construct
  source 1..1907: mol_type = other RNA
agaataaactagtattcttctggtccccacagactcagagagaacccgccaccatggattggatttggagaatcctgttcctcgtgggcgccgctaccggagcccactcccagggcagactgtttcagtctggcgccgaagtgaaaagaccaggcgcctctgtgcggatcagctgcagagctgacgacgacccctacaccgacgacgataccttcaccaagtactggacccactggatcagacaggcccctggacaaagacctgagtggctgggagtgatcagccctcacttcgccagacctatctacagctacaagttccgggacagactgaccctgaccagagacagctctctgaccgccgtgtacctggaactgaagggcctgcagcctgacgacagcggcatctacttttgcgccagagatcccttcggcgacagagcccctcactacaactaccacatggacgtgtggggcggaggcacagccgtgatagttagcagcgcctctacaaagggccctagcgtgttccctctggctcctagcagcaagtcgacatctggcggaacagccgctctgggctgtctggtcaaggactactttcccgagcctgtgacagtgtcctggaactctggcgctctgacaagcggcgtgcacacatttccagccgtgctgcaaagcagcggcctgtactctctgagcagcgtggtcacagtgccaagctctagcctgggcacccagacctacatctgcaatgtgaaccacaagcctagcaacaccaaggtggacaagaaggtggaacccaagagctgcgacaagacccacacctgtcctccatgtcctgctccagaactgctcggcggaccttccgtgttcctgtttcctccaaagcctaaggacaccctgatgatcagcagaacccctgaagtgacctgcgtggtggtggatgtgtctcacgaggacccagaagtgaagttcaattggtacgtggacggcgtggaagtgcacaacgccaagaccaagcctagagaggaacagtacaacagcacctacagagtggtgtccgtgctgacagtgctgcaccaggattggctgaacggcaaagagtacaagtgcaaggtgtccaacaaggccctgcctgctcctatcgagaaaaccatcagcaaggccaagggccagcctagggaaccccaggtttacacactgcctccaagccgcgacgaactgaccaagaaccaggtgtccctgacctgcctcgtgaagggcttctacccttccgatatcgccgtggaatgggagagcaatggccagcctgagaacaactacaagacaacccctcctgtgctggacagcgacggctcattcttcctgtacagcaagctgaccgtggacaagtccagatggcagcagggcaacgtgttcagctgtagcgtgctgcacgaagccctgcacagccactacacccagaaaagcctgtctctgagccccggcaaatgataaggatccgatctggtactgcatgcacgcaatgctagctgcccctttcccgtcctgggtaccccgagtctcccccgacctcgggtcccaggtatgctcccacctccacctgccccactcaccacctctgctagttccagacacctcccaagcacgcagcaatgcagctcaaaacgcttagcctagccacacccccacgggaaacagcagtgattaacctttagcaataaacgaaagtttaactaagctatactaaccccagggttggtcaatttcgtgccagccacaccctcgagctagcaaaaaaaaaaaaaaaaaaaaaaaaaaaaaagcatatgactaaaaaaaaaaaaaaaaaaaaaaaaaaaaaaaaaaaaaaaaaaaaaaaaaaaaaaaaaaaaaaaaaaaaaa

SEQ ID NO: 677 - RNA, 1907 nt, synthetic construct
  source 1..1907: mol_type = other RNA
agaataaactagtattcttctggtccccacagactcagagagaacccgccaccatggattggatttggagaatcctgttcctcgtgggcgccgctaccggagcccactcccagggcagactgtttcagtctggcgccgaagtgaaaagaccaggcgcctctgtgcggatcagctgcagagctgacgacgacccctacaccgacgacgataccttcaccaagtactggacccactggatcagacaggcccctggacaaagacctgagtggctgggagtgatcagccctcacttcgccagacctatctacagctacaagttccgggacagactgaccctgaccagagacagctctctgaccgccgtgtacctggaactgaagggcctgcagcctgacgacagcggcatctacttttgcgccagagatcccttcggcgacagagcccctcactacaactaccacatggacgtgtggggcggaggcacagccgtgatagttagcagcgcctctacaaagggccctagcgtgttccctctggctcctagcagcaagtcgacatctggcggaacagccgctctgggctgtctggtcaaggactactttcccgagcctgtgacagtgtcctggaactctggcgctctgacaagcggcgtgcacacatttccagccgtgctgcaaagcagcggcctgtactctctgagcagcgtggtcacagtgccaagctctagcctgggcacccagacctacatctgcaatgtgaaccacaagcctagcaacaccaaggtggacaagaaggtggaacccaagagctgcgacaagacccacacctgtcctccatgtcctgctccagaactgctcggcggaccttccgtgttcctgtttcctccaaagcctaaggacaccctgatgatcagcagaacccctgaagtgacctgcgtggtggtggatgtgtctcacgaggacccagaagtgaagttcaattggtacgtggacggcgtggaagtgcacaacgccaagaccaagcctagagaggaacagtacaacagcacctacagagtggtgtccgtgctgacagtgctgcaccaggattggctgaacggcaaagagtacaagtgcaaggtgtccaacaaggccctgcctgctcctatcgagaaaaccatcagcaaggccaagggccagcctagggaaccccaggtttacaccctgcctccatgccgcgacgaactgaccaagaaccaggtgtccctgtggtgcctggtcaagggcttctacccttccgatatcgccgtggaatgggagagcaatggccagcctgagaacaactacaagacaacccctcctgtgctggacagcgacggctcattcttcctgtacagcaagctgacagtggacaagagcagatggcagcagggcaacgtgttcagctgcagcgtgctgcatgaagccctgcacagccactacacccagaagtccctgtctctgagccccggcaagtgataaggatccgatctggtactgcatgcacgcaatgctagctgcccctttcccgtcctgggtaccccgagtctcccccgacctcgggtcccaggtatgctcccacctccacctgccccactcaccacctctgctagttccagacacctcccaagcacgcagcaatgcagctcaaaacgcttagcctagccacacccccacgggaaacagcagtgattaacctttagcaataaacgaaagtttaactaagctatactaaccccagggttggtcaatttcgtgccagccacaccctcgagctagcaaaaaaaaaaaaaaaaaaaaaaaaaaaaaagcatatgactaaaaaaaaaaaaaaaaaaaaaaaaaaaaaaaaaaaaaaaaaaaaaaaaaaaaaaaaaaaaaaaaaaaaaa

SEQ ID NO: 678 - RNA, 1907 nt, synthetic construct
  source 1..1907: mol_type = other RNA
agaataaactagtattcttctggtccccacagactcagagagaacccgccaccatggattggatttggagaatcctgttcctcgtgggcgccgctaccggagcccactcccagggcagactgtttcagtctggcgccgaagtgaaaagaccaggcgcctctgtgcggatcagctgcagagctgacgacgacccctacaccgacgacgataccttcaccaagtactggacccactggatcagacaggcccctggacaaagacctgagtggctgggagtgatcagccctcacttcgccagacctatctacagctacaagttccgggacagactgaccctgaccagagacagctctctgaccgccgtgtacctggaactgaagggcctgcagcctgacgacagcggcatctacttttgcgccagagatcccttcggcgacagagcccctcactacaactaccacatggacgtgtggggcggaggcacagccgtgatagttagcagcgcctctacaaagggccctagcgtgttccctctggctcctagcagcaagtcgacatctggcggaacagccgctctgggctgtctggtcaaggactactttcccgagcctgtgacagtgtcctggaactctggcgctctgacaagcggcgtgcacacatttccagccgtgctgcaaagcagcggcctgtactctctgagcagcgtggtcacagtgccaagctctagcctgggcacccagacctacatctgcaatgtgaaccacaagcctagcaacaccaaggtggacaagaaggtggaacccaagagctgcgacaagacccacacctgtcctccatgtcctgctccagaactgctggccggaccttccgtgttcctgtttcctccaaagcctaaggacaccctgatgatcagcagaacccctgaagtgacctgcgtggtggtggatgtgtctcacgaggaccctgaagtgaagttcaattggtacgtggacggcgtggaagtgcacaacgccaagaccaagcctagagaggaacagtacaacagcacctacagagtggtgtccgtgctgaccgtgctgcaccaggattggctgaacggcaaagagtacaagtgcaaggtgtccaacaaggccctgcctctgcctgaggaaaagaccatcagcaaggccaagggccagcctagggaaccccaggtttacacactgcctccaagccgcgacgaactgaccaagaaccaggtgtccctgacctgcctcgtgaagggcttctacccttccgatatcgccgtggaatgggagagcaatggccagcctgagaacaactacaagacaacccctcctgtgctggacagcgacggctcattcttcctgtacagcaagctgaccgtggacaagtccagatggcagcagggcaacgtgttcagctgtagcgtgctgcacgaagccctgcacagccactacacccagaaaagcctgtctctgagccccggcaaatgataaggatccgatctggtactgcatgcacgcaatgctagctgcccctttcccgtcctgggtaccccgagtctcccccgacctcgggtcccaggtatgctcccacctccacctgccccactcaccacctctgctagttccagacacctcccaagcacgcagcaatgcagctcaaaacgcttagcctagccacacccccacgggaaacagcagtgattaacctttagcaataaacgaaagtttaactaagctatactaaccccagggttggtcaatttcgtgccagccacaccctcgagctagcaaaaaaaaaaaaaaaaaaaaaaaaaaaaaagcatatgactaaaaaaaaaaaaaaaaaaaaaaaaaaaaaaaaaaaaaaaaaaaaaaaaaaaaaaaaaaaaaaaaaaaaaa

SEQ ID NO: 679 - RNA, 1907 nt, synthetic construct
  source 1..1907: mol_type = other RNA
agaataaactagtattcttctggtccccacagactcagagagaacccgccaccatggattggatttggagaatcctgttcctcgtgggcgccgctaccggagcccactcccagggcagactgtttcagtctggcgccgaagtgaaaagaccaggcgcctctgtgcggatcagctgcagagctgacgacgacccctacaccgacgacgataccttcaccaagtactggacccactggatcagacaggcccctggacaaagacctgagtggctgggagtgatcagccctcacttcgccagacctatctacagctacaagttccgggacagactgaccctgaccagagacagctctctgaccgccgtgtacctggaactgaagggcctgcagcctgacgacagcggcatctacttttgcgccagagatcccttcggcgacagagcccctcactacaactaccacatggacgtgtggggcggaggcacagccgtgatagttagcagcgcctctacaaagggccctagcgtgttccctctggctcctagcagcaagtcgacatctggcggaacagccgctctgggctgtctggtcaaggactactttcccgagcctgtgacagtgtcctggaactctggcgctctgacaagcggcgtgcacacatttccagccgtgctgcaaagcagcggcctgtactctctgagcagcgtggtcacagtgccaagctctagcctgggcacccagacctacatctgcaatgtgaaccacaagcctagcaacaccaaggtggacaagaaggtggaacccaagagctgcgacaagacccacacctgtcctccatgtcctgctccagaactgctggccggaccttccgtgttcctgtttcctccaaagcctaaggacaccctgatgatcagcagaacccctgaagtgacctgcgtggtggtggatgtgtctcacgaggaccctgaagtgaagttcaattggtacgtggacggcgtggaagtgcacaacgccaagaccaagcctagagaggaacagtacaacagcacctacagagtggtgtccgtgctgaccgtgctgcaccaggattggctgaacggcaaagagtacaagtgcaaggtgtccaacaaggccctgcctgcccctgaggaaaagaccatcagcaaggccaagggccagcctagggaaccccaggtttacacactgcctccaagccgcgacgaactgaccaagaaccaggtgtccctgacctgcctcgtgaagggcttctacccttccgatatcgccgtggaatgggagagcaatggccagcctgagaacaactacaagacaacccctcctgtgctggacagcgacggctcattcttcctgtacagcaagctgaccgtggacaagtccagatggcagcagggcaacgtgttcagctgtagcgtgctgcacgaagccctgcacagccactacacccagaaaagcctgtctctgagccccggcaaatgataaggatccgatctggtactgcatgcacgcaatgctagctgcccctttcccgtcctgggtaccccgagtctcccccgacctcgggtcccaggtatgctcccacctccacctgccccactcaccacctctgctagttccagacacctcccaagcacgcagcaatgcagctcaaaacgcttagcctagccacacccccacgggaaacagcagtgattaacctttagcaataaacgaaagtttaactaagctatactaaccccagggttggtcaatttcgtgccagccacaccctcgagctagcaaaaaaaaaaaaaaaaaaaaaaaaaaaaaagcatatgactaaaaaaaaaaaaaaaaaaaaaaaaaaaaaaaaaaaaaaaaaaaaaaaaaaaaaaaaaaaaaaaaaaaaaa

SEQ ID NO: 680 - RNA, 1907 nt, synthetic construct
  source 1..1907: mol_type = other RNA
agaataaactagtattcttctggtccccacagactcagagagaacccgccaccatggattggatttggagaatcctgttcctcgtgggcgccgctaccggagcccactcccagggcagactgtttcagtctggcgccgaagtgaaaagaccaggcgcctctgtgcggatcagctgcagagctgacgacgacccctacaccgacgacgataccttcaccaagtactggacccactggatcagacaggcccctggacaaagacctgagtggctgggagtgatcagccctcacttcgccagacctatctacagctacaagttccgggacagactgaccctgaccagagacagctctctgaccgccgtgtacctggaactgaagggcctgcagcctgacgacagcggcatctacttttgcgccagagatcccttcggcgacagagcccctcactacaactaccacatggacgtgtggggcggaggcacagccgtgatagttagcagcgcctctacaaagggccctagcgtgttccctctggctcctagcagcaagtcgacatctggcggaacagccgctctgggctgtctggtcaaggactactttcccgagcctgtgacagtgtcctggaactctggcgctctgacaagcggcgtgcacacatttccagccgtgctgcaaagcagcggcctgtactctctgagcagcgtggtcacagtgccaagctctagcctgggcacccagacctacatctgcaatgtgaaccacaagcctagcaacaccaaggtggacaagagagtggaacccaagagctgcgacaagacccacacctgtcctccatgtcctgctccagaactgctcggcggaccttccgtgttcctgtttcctccaaagcctaaggacaccctgatgatcagcagaacccctgaagtgacctgcgtggtggtggatgtgtctcacgaggacccagaagtgaagttcaattggtacgtggacggcgtggaagtgcacaacgccaagaccaagcctagagaggaacagtacaacagcacctacagagtggtgtccgtgctgacagtgctgcaccaggattggctgaacggcaaagagtacaagtgcaaggtgtccaacaaggccctgcctgctcctatcgagaaaaccatcagcaaggccaagggccagcctcgcgaacctcaagtctgtacactgcctcctagccgcgaggaaatgaccaagaaccaggtgtccctgagctgcgccgtgaagggcttttacccttccgatatcgccgtggaatgggagagcaatggccagcctgagaacaactacaagacaacccctcctgtgctggacagcgacggctcattcttcctggtgtccaagctgacagtggacaagagcagatggcagcagggcaacgtgttcagctgcagcgtgctgcatgaagccctgcacagccactacacccagaagtccctgtctctgagccccggcaagtgataaggatccgatctggtactgcatgcacgcaatgctagctgcccctttcccgtcctgggtaccccgagtctcccccgacctcgggtcccaggtatgctcccacctccacctgccccactcaccacctctgctagttccagacacctcccaagcacgcagcaatgcagctcaaaacgcttagcctagccacacccccacgggaaacagcagtgattaacctttagcaataaacgaaagtttaactaagctatactaaccccagggttggtcaatttcgtgccagccacaccctcgagctagcaaaaaaaaaaaaaaaaaaaaaaaaaaaaaagcatatgactaaaaaaaaaaaaaaaaaaaaaaaaaaaaaaaaaaaaaaaaaaaaaaaaaaaaaaaaaaaaaaaaaaaaaa

SEQ ID NO: 681 - RNA, 1907 nt, synthetic construct
  source 1..1907: mol_type = other RNA
agaataaactagtattcttctggtccccacagactcagagagaacccgccaccatggattggatttggagaatcctgttcctcgtgggcgccgctaccggagcccactcccagggcagactgtttcagtctggcgccgaagtgaaaagaccaggcgcctctgtgcggatcagctgcagagctgacgacgacccctacaccgacgacgataccttcaccaagtactggacccactggatcagacaggcccctggacaaagacctgagtggctgggagtgatcagccctcacttcgccagacctatctacagctacaagttccgggacagactgaccctgaccagagacagctctctgaccgccgtgtacctggaactgaagggcctgcagcctgacgacagcggcatctacttttgcgccagagatcccttcggcgacagagcccctcactacaactaccacatggacgtgtggggcggaggcacagccgtgatagttagcagcgcctctacaaagggccctagcgtgttccctctggctcctagcagcaagtcgacatctggcggaacagccgctctgggctgtctggtcaaggactactttcccgagcctgtgacagtgtcctggaactctggcgctctgacaagcggcgtgcacacatttccagccgtgctgcaaagcagcggcctgtactctctgagcagcgtggtcacagtgccaagctctagcctgggcacccagacctacatctgcaatgtgaaccacaagcctagcaacaccaaggtggacaagagagtggaacccaagagctgcgacaagacccacacctgtcctccatgtcctgctccagaactgctggccggaccttccgtgttcctgtttcctccaaagcctaaggacaccctgatgatcagcagaacccctgaagtgacctgcgtggtggtggatgtgtctcacgaggaccctgaagtgaagttcaattggtacgtggacggcgtggaagtgcacaacgccaagaccaagcctagagaggaacagtacaacagcacctacagagtggtgtccgtgctgaccgtgctgcaccaggattggctgaacggcaaagagtacaagtgcaaggtgtccaacaaggccctgcctgcccctatcgaaaagaccatcagcaaggccaagggccagcctagggaaccccaggtttacacactgcctccaagccgcgaggaaatgaccaagaaccaggtgtccctgacctgcctcgtgaagggcttctacccttccgatatcgccgtggaatgggagagcaatggccagcctgagaacaactacaagacaacccctcctgtgctggacagcgacggctcattcttcctgtacagcaagctgaccgtggacaagtccagatggcagcagggcaacgtgttcagctgtagcgtgctgcacgaagccctgcacagccactacacccagaaaagcctgtctctgagccccggcaaatgataaggatccgatctggtactgcatgcacgcaatgctagctgcccctttcccgtcctgggtaccccgagtctcccccgacctcgggtcccaggtatgctcccacctccacctgccccactcaccacctctgctagttccagacacctcccaagcacgcagcaatgcagctcaaaacgcttagcctagccacacccccacgggaaacagcagtgattaacctttagcaataaacgaaagtttaactaagctatactaaccccagggttggtcaatttcgtgccagccacaccctcgagctagcaaaaaaaaaaaaaaaaaaaaaaaaaaaaaagcatatgactaaaaaaaaaaaaaaaaaaaaaaaaaaaaaaaaaaaaaaaaaaaaaaaaaaaaaaaaaaaaaaaaaaaaaa

SEQ ID NO: 682 - RNA, 1907 nt, synthetic construct
  source 1..1907: mol_type = other RNA
agaataaactagtattcttctggtccccacagactcagagagaacccgccaccatggattggatttggagaatcctgttcctcgtgggcgccgctaccggagcccactcccagggcagactgtttcagtctggcgccgaagtgaaaagaccaggcgcctctgtgcggatcagctgcagagctgacgacgacccctacaccgacgacgataccttcaccaagtactggacccactggatcagacaggcccctggacaaagacctgagtggctgggagtgatcagccctcacttcgccagacctatctacagctacaagttccgggacagactgaccctgaccagagacagctctctgaccgccgtgtacctggaactgaagggcctgcagcctgacgacagcggcatctacttttgcgccagagatcccttcggcgacagagcccctcactacaactaccacatggacgtgtggggcggaggcacagccgtgatagttagcagcgcctctacaaagggccctagcgtgttccctctggctcctagcagcaagtcgacatctggcggaacagccgctctgggctgtctggtcaaggactactttcccgagcctgtgacagtgtcctggaactctggcgctctgacaagcggcgtgcacacatttccagccgtgctgcaaagcagcggcctgtactctctgagcagcgtggtcacagtgccaagctctagcctgggcacccagacctacatctgcaatgtgaaccacaagcctagcaacaccaaggtggacaagagagtggaacccaagagctgcgacaagacccacacctgtcctccatgtcctgctccagaactgctgggcggaccttccgtgttcctgtttcctccaaagcctaaggacaccctgatgatcagcagaacccctgaagtgacctgcgtggtggtggatgtgtctcacgaggaccctgaagtgaagttcaattggtacgtggacggcgtggaagtgcacaacgccaagaccaagcctagagaggaacagtacaacagcacctacagagtggtgtccgtgctgaccgtgctgcaccaggattggctgaacggcaaagagtacaagtgcaaggtgtccaacaaggccctgcctgcccctgaggaaaagaccatcagcaaggccaagggccagcctagggaaccccaggtttacacactgcctccaagccgcgaggaaatgaccaagaaccaggtgtccctgacctgcctcgtgaagggcttctacccttccgatatcgccgtggaatgggagagcaatggccagcctgagaacaactacaagacaacccctcctgtgctggacagcgacggctcattcttcctgtacagcaagctgaccgtggacaagtccagatggcagcagggcaacgtgttcagctgtagcgtgctgcacgaagccctgcacagccactacacccagaaaagcctgtctctgagccccggcaaatgataaggatccgatctggtactgcatgcacgcaatgctagctgcccctttcccgtcctgggtaccccgagtctcccccgacctcgggtcccaggtatgctcccacctccacctgccccactcaccacctctgctagttccagacacctcccaagcacgcagcaatgcagctcaaaacgcttagcctagccacacccccacgggaaacagcagtgattaacctttagcaataaacgaaagtttaactaagctatactaaccccagggttggtcaatttcgtgccagccacaccctcgagctagcaaaaaaaaaaaaaaaaaaaaaaaaaaaaaagcatatgactaaaaaaaaaaaaaaaaaaaaaaaaaaaaaaaaaaaaaaaaaaaaaaaaaaaaaaaaaaaaaaaaaaaaaa

SEQ ID NO: 683 - RNA, 1907 nt, synthetic construct
  source 1..1907: mol_type = other RNA
agaataaactagtattcttctggtccccacagactcagagagaacccgccaccatggattggatttggagaatcctgttcctcgtgggcgccgctaccggagcccactcccagggcagactgtttcagtctggcgccgaagtgaaaagaccaggcgcctctgtgcggatcagctgcagagctgacgacgacccctacaccgacgacgataccttcaccaagtactggacccactggatcagacaggcccctggacaaagacctgagtggctgggagtgatcagccctcacttcgccagacctatctacagctacaagttccgggacagactgaccctgaccagagacagctctctgaccgccgtgtacctggaactgaagggcctgcagcctgacgacagcggcatctacttttgcgccagagatcccttcggcgacagagcccctcactacaactaccacatggacgtgtggggcggaggcacagccgtgatagttagcagcgcctctacaaagggccctagcgtgttccctctggctcctagcagcaagtcgacatctggcggaacagccgctctgggctgtctggtcaaggactactttcccgagcctgtgacagtgtcctggaactctggcgctctgacaagcggcgtgcacacatttccagccgtgctgcaaagcagcggcctgtactctctgagcagcgtggtcacagtgccaagctctagcctgggcacccagacctacatctgcaatgtgaaccacaagcctagcaacaccaaggtggacaagagagtggaacccaagagctgcgacaagacccacacctgtcctccatgtcctgctccagaactgctggccggaccttccgtgttcctgtttcctccaaagcctaaggacaccctgatgatcagcagaacccctgaagtgacctgcgtggtggtggatgtgtctcacgaggaccctgaagtgaagttcaattggtacgtggacggcgtggaagtgcacaacgccaagaccaagcctagagaggaacagtacaacagcacctacagagtggtgtccgtgctgaccgtgctgcaccaggattggctgaacggcaaagagtacaagtgcaaggtgtccaacaaggccctgcctctgcctgaggaaaagaccatcagcaaggccaagggccagcctcgcgaacctcaagtctgtacactgcctcctagccgcgaggaaatgaccaagaaccaggtgtccctgagctgcgccgtgaagggcttttacccttccgatatcgccgtggaatgggagagcaatggccagcctgagaacaactacaagacaacccctcctgtgctggacagcgacggctcattcttcctggtgtccaagctgacagtggacaagagcagatggcagcagggcaacgtgttcagctgcagcgtgctgcatgaagccctgcacagccactacacccagaagtccctgtctctgagccccggcaagtgataaggatccgatctggtactgcatgcacgcaatgctagctgcccctttcccgtcctgggtaccccgagtctcccccgacctcgggtcccaggtatgctcccacctccacctgccccactcaccacctctgctagttccagacacctcccaagcacgcagcaatgcagctcaaaacgcttagcctagccacacccccacgggaaacagcagtgattaacctttagcaataaacgaaagtttaactaagctatactaaccccagggttggtcaatttcgtgccagccacaccctcgagctagcaaaaaaaaaaaaaaaaaaaaaaaaaaaaaagcatatgactaaaaaaaaaaaaaaaaaaaaaaaaaaaaaaaaaaaaaaaaaaaaaaaaaaaaaaaaaaaaaaaaaaaaaa

SEQ ID NO: 684 - RNA, 1907 nt, synthetic construct
  source 1..1907: mol_type = other RNA
agaataaactagtattcttctggtccccacagactcagagagaacccgccaccatggattggatttggagaatcctgttcctcgtgggcgccgctaccggagcccactcccagggcagactgtttcagtctggcgccgaagtgaaaagaccaggcgcctctgtgcggatcagctgcagagctgacgacgacccctacaccgacgacgataccttcaccaagtactggacccactggatcagacaggcccctggacaaagacctgagtggctgggagtgatcagccctcacttcgccagacctatctacagctacaagttccgggacagactgaccctgaccagagacagctctctgaccgccgtgtacctggaactgaagggcctgcagcctgacgacagcggcatctacttttgcgccagagatcccttcggcgacagagcccctcactacaactaccacatggacgtgtggggcggaggcacagccgtgatagttagcagcgcctctacaaagggccctagcgtgttccctctggctcctagcagcaagtcgacatctggcggaacagccgctctgggctgtctggtcaaggactactttcccgagcctgtgacagtgtcctggaactctggcgctctgacaagcggcgtgcacacatttccagccgtgctgcaaagcagcggcctgtactctctgagcagcgtggtcacagtgccaagctctagcctgggcacccagacctacatctgcaatgtgaaccacaagcctagcaacaccaaggtggacaagagagtggaacccaagagctgcgacaagacccacacctgtcctccatgtcctgctccagaactgctggccggaccttccgtgttcctgtttcctccaaagcctaaggacaccctgatgatcagcagaacccctgaagtgacctgcgtggtggtggatgtgtctcacgaggaccctgaagtgaagttcaattggtacgtggacggcgtggaagtgcacaacgccaagaccaagcctagagaggaacagtacaacagcacctacagagtggtgtccgtgctgaccgtgctgcaccaggattggctgaacggcaaagagtacaagtgcaaggtgtccaacaaggccctgcctgcccctgaggaaaagaccatcagcaaggccaagggccagcctcgcgaacctcaagtctgtacactgcctcctagccgcgaggaaatgaccaagaaccaggtgtccctgagctgcgccgtgaagggcttttacccttccgatatcgccgtggaatgggagagcaatggccagcctgagaacaactacaagacaacccctcctgtgctggacagcgacggctcattcttcctggtgtccaagctgacagtggacaagagcagatggcagcagggcaacgtgttcagctgcagcgtgctgcatgaagccctgcacagccactacacccagaagtccctgtctctgagccccggcaagtgataaggatccgatctggtactgcatgcacgcaatgctagctgcccctttcccgtcctgggtaccccgagtctcccccgacctcgggtcccaggtatgctcccacctccacctgccccactcaccacctctgctagttccagacacctcccaagcacgcagcaatgcagctcaaaacgcttagcctagccacacccccacgggaaacagcagtgattaacctttagcaataaacgaaagtttaactaagctatactaaccccagggttggtcaatttcgtgccagccacaccctcgagctagcaaaaaaaaaaaaaaaaaaaaaaaaaaaaaagcatatgactaaaaaaaaaaaaaaaaaaaaaaaaaaaaaaaaaaaaaaaaaaaaaaaaaaaaaaaaaaaaaaaaaaaaaa

SEQ ID NO: 685 - RNA, 1907 nt, synthetic construct
  source 1..1907: mol_type = other RNA
agaataaactagtattcttctggtccccacagactcagagagaacccgccaccatggattggatttggagaatcctgttcctcgtgggcgccgctaccggagcccactcccagggcagactgtttcagtctggcgccgaagtgaaaagaccaggcgcctctgtgcggatcagctgcagagctgacgacgacccctacaccgacgacgataccttcaccaagtactggacccactggatcagacaggcccctggacaaagacctgagtggctgggagtgatcagccctcacttcgccagacctatctacagctacaagttccgggacagactgaccctgaccagagacagctctctgaccgccgtgtacctggaactgaagggcctgcagcctgacgacagcggcatctacttttgcgccagagatcccttcggcgacagagcccctcactacaactaccacatggacgtgtggggcggaggcacagccgtgatagttagcagcgcctctacaaagggccctagcgtgttccctctggctcctagcagcaagtcgacatctggcggaacagccgctctgggctgtctggtcaaggactactttcccgagcctgtgacagtgtcctggaactctggcgctctgacaagcggcgtgcacacatttccagccgtgctgcaaagcagcggcctgtactctctgagcagcgtggtcacagtgccaagctctagcctgggcacccagacctacatctgcaatgtgaaccacaagcctagcaacaccaaggtggacaagagagtggaacccaagagctgcgacaagacccacacctgtcctccatgtcctgctccagaactgctggccggaccttccgtgttcctgtttcctccaaagcctaaggacaccctgatgatcagcagaacccctgaagtgacctgcgtggtggtggatgtgtctcacgaggaccctgaagtgaagttcaattggtacgtggacggcgtggaagtgcacaacgccaagaccaagcctagagaggaacagtacaacagcacctacagagtggtgtccgtgctgaccgtgctgcaccaggattggctgaacggcaaagagtacaagtgcaaggtgtccaacaaggccctgcctctgcctgaggaaaagaccatcagcaaggccaagggccagcctagggaaccccaggtttacaccctgcctccatgccgcgaggaaatgaccaagaaccaggtgtccctgtggtgcctggtcaagggcttctacccttccgatatcgccgtggaatgggagagcaatggccagcctgagaacaactacaagacaacccctcctgtgctggacagcgacggctcattcttcctgtacagcaagctgacagtggacaagagcagatggcagcagggcaacgtgttcagctgcagcgtgctgcatgaagccctgcacagccactacacccagaagtccctgtctctgagccccggcaagtgataaggatccgatctggtactgcatgcacgcaatgctagctgcccctttcccgtcctgggtaccccgagtctcccccgacctcgggtcccaggtatgctcccacctccacctgccccactcaccacctctgctagttccagacacctcccaagcacgcagcaatgcagctcaaaacgcttagcctagccacacccccacgggaaacagcagtgattaacctttagcaataaacgaaagtttaactaagctatactaaccccagggttggtcaatttcgtgccagccacaccctcgagctagcaaaaaaaaaaaaaaaaaaaaaaaaaaaaaagcatatgactaaaaaaaaaaaaaaaaaaaaaaaaaaaaaaaaaaaaaaaaaaaaaaaaaaaaaaaaaaaaaaaaaaaaaa

SEQ ID NO: 686 - RNA, 1907 nt, synthetic construct
  source 1..1907: mol_type = other RNA
agaataaactagtattcttctggtccccacagactcagagagaacccgccaccatggattggatttggagaatcctgttcctcgtgggcgccgctaccggagcccactcccagggcagactgtttcagtctggcgccgaagtgaaaagaccaggcgcctctgtgcggatcagctgcagagctgacgacgacccctacaccgacgacgataccttcaccaagtactggacccactggatcagacaggcccctggacaaagacctgagtggctgggagtgatcagccctcacttcgccagacctatctacagctacaagttccgggacagactgaccctgaccagagacagctctctgaccgccgtgtacctggaactgaagggcctgcagcctgacgacagcggcatctacttttgcgccagagatcccttcggcgacagagcccctcactacaactaccacatggacgtgtggggcggaggcacagccgtgatagttagcagcgcctctacaaagggccctagcgtgttccctctggctcctagcagcaagtcgacatctggcggaacagccgctctgggctgtctggtcaaggactactttcccgagcctgtgacagtgtcctggaactctggcgctctgacaagcggcgtgcacacatttccagccgtgctgcaaagcagcggcctgtactctctgagcagcgtggtcacagtgccaagctctagcctgggcacccagacctacatctgcaatgtgaaccacaagcctagcaacaccaaggtggacaagagagtggaacccaagagctgcgacaagacccacacctgtcctccatgtcctgctccagaactgctggccggaccttccgtgttcctgtttcctccaaagcctaaggacaccctgatgatcagcagaacccctgaagtgacctgcgtggtggtggatgtgtctcacgaggaccctgaagtgaagttcaattggtacgtggacggcgtggaagtgcacaacgccaagaccaagcctagagaggaacagtacaacagcacctacagagtggtgtccgtgctgaccgtgctgcaccaggattggctgaacggcaaagagtacaagtgcaaggtgtccaacaaggccctgcctgcccctgaggaaaagaccatcagcaaggccaagggccagcctagggaaccccaggtttacaccctgcctccatgccgcgaggaaatgaccaagaaccaggtgtccctgtggtgcctggtcaagggcttctacccttccgatatcgccgtggaatgggagagcaatggccagcctgagaacaactacaagacaacccctcctgtgctggacagcgacggctcattcttcctgtacagcaagctgacagtggacaagagcagatggcagcagggcaacgtgttcagctgcagcgtgctgcatgaagccctgcacagccactacacccagaagtccctgtctctgagccccggcaagtgataaggatccgatctggtactgcatgcacgcaatgctagctgcccctttcccgtcctgggtaccccgagtctcccccgacctcgggtcccaggtatgctcccacctccacctgccccactcaccacctctgctagttccagacacctcccaagcacgcagcaatgcagctcaaaacgcttagcctagccacacccccacgggaaacagcagtgattaacctttagcaataaacgaaagtttaactaagctatactaaccccagggttggtcaatttcgtgccagccacaccctcgagctagcaaaaaaaaaaaaaaaaaaaaaaaaaaaaaagcatatgactaaaaaaaaaaaaaaaaaaaaaaaaaaaaaaaaaaaaaaaaaaaaaaaaaaaaaaaaaaaaaaaaaaaaaa

SEQ ID NO: 687 - RNA, 1907 nt, synthetic construct
  source 1..1907: mol_type = other RNA
agaataaactagtattcttctggtccccacagactcagagagaacccgccaccatggattggatttggagaatcctgttcctcgtgggcgccgctaccggagcccactcccagggcagactgtttcagtctggcgccgaagtgaaaagaccaggcgcctctgtgcggatcagctgcagagctgacgacgacccctacaccgacgacgataccttcaccaagtactggacccactggatcagacaggcccctggacaaagacctgagtggctgggagtgatcagccctcacttcgccagacctatctacagctacaagttccgggacagactgaccctgaccagagacagctctctgaccgccgtgtacctggaactgaagggcctgcagcctgacgacagcggcatctacttttgcgccagagatcccttcggcgacagagcccctcactacaactaccacatggacgtgtggggcggaggcacagccgtgatagttagcagcgcctctacaaagggccctagcgtgttccctctggctcctagcagcaagtcgacatctggcggaacagccgctctgggctgtctggtcaaggactactttcccgagcctgtgacagtgtcctggaactctggcgctctgacaagcggcgtgcacacatttccagccgtgctgcaaagcagcggcctgtactctctgagcagcgtggtcacagtgccaagctctagcctgggcacccagacctacatctgcaatgtgaaccacaagcctagcaacaccaaggtggacaagaaggtggaacccaagagctgcgacaagacccacacctgtcctccatgtcctgctccagaactgctcggcggaccttccgtgttcctgtttcctccaaagcctaaggacaccctgatgatcagcagaacccctgaagtgacctgcgtggtggtggatgtgtctcacgaggacccagaagtgaagttcaattggtacgtggacggcgtggaagtgcacaacgccaagaccaagcctagagaggaacagtacaacagcacctacagagtggtgtccgtgctgacagtgctgcaccaggattggctgaacggcaaagagtacaagtgcaaggtgtccaacaaggccctgcctgctcctatcgagaaaaccatcagcaaggccaagggccagcctcgcgaacctcaagtctgtacactgcctcctagccgcgaggaaatgaccaagaaccaggtgtccctgagctgcgccgtgaagggcttttacccttccgatatcgccgtggaatgggagagcaatggccagcctgagaacaactacaagacaacccctcctgtgctggacagcgacggctcattcttcctggtgtccaagctgacagtggacaagagcagatggcagcagggcaacgtgttcagctgcagcgtgctgcatgaagccctgcacagccactacacccagaagtccctgtctctgagccccggcaagtgataaggatccgatctggtactgcatgcacgcaatgctagctgcccctttcccgtcctgggtaccccgagtctcccccgacctcgggtcccaggtatgctcccacctccacctgccccactcaccacctctgctagttccagacacctcccaagcacgcagcaatgcagctcaaaacgcttagcctagccacacccccacgggaaacagcagtgattaacctttagcaataaacgaaagtttaactaagctatactaaccccagggttggtcaatttcgtgccagccacaccctcgagctagcaaaaaaaaaaaaaaaaaaaaaaaaaaaaaagcatatgactaaaaaaaaaaaaaaaaaaaaaaaaaaaaaaaaaaaaaaaaaaaaaaaaaaaaaaaaaaaaaaaaaaaaaa

SEQ ID NO: 688 - RNA, 1907 nt, synthetic construct
  source 1..1907: mol_type = other RNA
agaataaactagtattcttctggtccccacagactcagagagaacccgccaccatggattggatttggagaatcctgttcctcgtgggcgccgctaccggagcccactcccagggcagactgtttcagtctggcgccgaagtgaaaagaccaggcgcctctgtgcggatcagctgcagagctgacgacgacccctacaccgacgacgataccttcaccaagtactggacccactggatcagacaggcccctggacaaagacctgagtggctgggagtgatcagccctcacttcgccagacctatctacagctacaagttccgggacagactgaccctgaccagagacagctctctgaccgccgtgtacctggaactgaagggcctgcagcctgacgacagcggcatctacttttgcgccagagatcccttcggcgacagagcccctcactacaactaccacatggacgtgtggggcggaggcacagccgtgatagttagcagcgcctctacaaagggccctagcgtgttccctctggctcctagcagcaagtcgacatctggcggaacagccgctctgggctgtctggtcaaggactactttcccgagcctgtgacagtgtcctggaactctggcgctctgacaagcggcgtgcacacatttccagccgtgctgcaaagcagcggcctgtactctctgagcagcgtggtcacagtgccaagctctagcctgggcacccagacctacatctgcaatgtgaaccacaagcctagcaacaccaaggtggacaagaaggtggaacccaagagctgcgacaagacccacacctgtcctccatgtcctgctccagaactgctggccggaccttccgtgttcctgtttcctccaaagcctaaggacaccctgatgatcagcagaacccctgaagtgacctgcgtggtggtggatgtgtctcacgaggaccctgaagtgaagttcaattggtacgtggacggcgtggaagtgcacaacgccaagaccaagcctagagaggaacagtacaacagcacctacagagtggtgtccgtgctgaccgtgctgcaccaggattggctgaacggcaaagagtacaagtgcaaggtgtccaacaaggccctgcctgcccctatcgaaaagaccatcagcaaggccaagggccagcctagggaaccccaggtttacacactgcctccaagccgcgaggaaatgaccaagaaccaggtgtccctgacctgcctcgtgaagggcttctacccttccgatatcgccgtggaatgggagagcaatggccagcctgagaacaactacaagacaacccctcctgtgctggacagcgacggctcattcttcctgtacagcaagctgaccgtggacaagtccagatggcagcagggcaacgtgttcagctgtagcgtgctgcacgaagccctgcacagccactacacccagaaaagcctgtctctgagccccggcaaatgataaggatccgatctggtactgcatgcacgcaatgctagctgcccctttcccgtcctgggtaccccgagtctcccccgacctcgggtcccaggtatgctcccacctccacctgccccactcaccacctctgctagttccagacacctcccaagcacgcagcaatgcagctcaaaacgcttagcctagccacacccccacgggaaacagcagtgattaacctttagcaataaacgaaagtttaactaagctatactaaccccagggttggtcaatttcgtgccagccacaccctcgagctagcaaaaaaaaaaaaaaaaaaaaaaaaaaaaaagcatatgactaaaaaaaaaaaaaaaaaaaaaaaaaaaaaaaaaaaaaaaaaaaaaaaaaaaaaaaaaaaaaaaaaaaaaa

SEQ ID NO: 689 - RNA, 1907 nt, synthetic construct
  source 1..1907: mol_type = other RNA
agaataaactagtattcttctggtccccacagactcagagagaacccgccaccatggattggatttggagaatcctgttcctcgtgggcgccgctaccggagcccactcccagggcagactgtttcagtctggcgccgaagtgaaaagaccaggcgcctctgtgcggatcagctgcagagctgacgacgacccctacaccgacgacgataccttcaccaagtactggacccactggatcagacaggcccctggacaaagacctgagtggctgggagtgatcagccctcacttcgccagacctatctacagctacaagttccgggacagactgaccctgaccagagacagctctctgaccgccgtgtacctggaactgaagggcctgcagcctgacgacagcggcatctacttttgcgccagagatcccttcggcgacagagcccctcactacaactaccacatggacgtgtggggcggaggcacagccgtgatagttagcagcgcctctacaaagggccctagcgtgttccctctggctcctagcagcaagtcgacatctggcggaacagccgctctgggctgtctggtcaaggactactttcccgagcctgtgacagtgtcctggaactctggcgctctgacaagcggcgtgcacacatttccagccgtgctgcaaagcagcggcctgtactctctgagcagcgtggtcacagtgccaagctctagcctgggcacccagacctacatctgcaatgtgaaccacaagcctagcaacaccaaggtggacaagaaggtggaacccaagagctgcgacaagacccacacctgtcctccatgtcctgctccagaactgctgggcggaccttccgtgttcctgtttcctccaaagcctaaggacaccctgatgatcagcagaacccctgaagtgacctgcgtggtggtggatgtgtctcacgaggaccctgaagtgaagttcaattggtacgtggacggcgtggaagtgcacaacgccaagaccaagcctagagaggaacagtacaacagcacctacagagtggtgtccgtgctgaccgtgctgcaccaggattggctgaacggcaaagagtacaagtgcaaggtgtccaacaaggccctgcctgcccctgaggaaaagaccatcagcaaggccaagggccagcctagggaaccccaggtttacacactgcctccaagccgcgaggaaatgaccaagaaccaggtgtccctgacctgcctcgtgaagggcttctacccttccgatatcgccgtggaatgggagagcaatggccagcctgagaacaactacaagacaacccctcctgtgctggacagcgacggctcattcttcctgtacagcaagctgaccgtggacaagtccagatggcagcagggcaacgtgttcagctgtagcgtgctgcacgaagccctgcacagccactacacccagaaaagcctgtctctgagccccggcaaatgataaggatccgatctggtactgcatgcacgcaatgctagctgcccctttcccgtcctgggtaccccgagtctcccccgacctcgggtcccaggtatgctcccacctccacctgccccactcaccacctctgctagttccagacacctcccaagcacgcagcaatgcagctcaaaacgcttagcctagccacacccccacgggaaacagcagtgattaacctttagcaataaacgaaagtttaactaagctatactaaccccagggttggtcaatttcgtgccagccacaccctcgagctagcaaaaaaaaaaaaaaaaaaaaaaaaaaaaaagcatatgactaaaaaaaaaaaaaaaaaaaaaaaaaaaaaaaaaaaaaaaaaaaaaaaaaaaaaaaaaaaaaaaaaaaaaa

SEQ ID NO: 690 - RNA, 1907 nt, synthetic construct
  source 1..1907: mol_type = other RNA
agaataaactagtattcttctggtccccacagactcagagagaacccgccaccatggattggatttggagaatcctgttcctcgtgggcgccgctaccggagcccactcccagggcagactgtttcagtctggcgccgaagtgaaaagaccaggcgcctctgtgcggatcagctgcagagctgacgacgacccctacaccgacgacgataccttcaccaagtactggacccactggatcagacaggcccctggacaaagacctgagtggctgggagtgatcagccctcacttcgccagacctatctacagctacaagttccgggacagactgaccctgaccagagacagctctctgaccgccgtgtacctggaactgaagggcctgcagcctgacgacagcggcatctacttttgcgccagagatcccttcggcgacagagcccctcactacaactaccacatggacgtgtggggcggaggcacagccgtgatagttagcagcgcctctacaaagggccctagcgtgttccctctggctcctagcagcaagtcgacatctggcggaacagccgctctgggctgtctggtcaaggactactttcccgagcctgtgacagtgtcctggaactctggcgctctgacaagcggcgtgcacacatttccagccgtgctgcaaagcagcggcctgtactctctgagcagcgtggtcacagtgccaagctctagcctgggcacccagacctacatctgcaatgtgaaccacaagcctagcaacaccaaggtggacaagaaggtggaacccaagagctgcgacaagacccacacctgtcctccatgtcctgctccagaactgctggccggaccttccgtgttcctgtttcctccaaagcctaaggacaccctgatgatcagcagaacccctgaagtgacctgcgtggtggtggatgtgtctcacgaggaccctgaagtgaagttcaattggtacgtggacggcgtggaagtgcacaacgccaagaccaagcctagagaggaacagtacaacagcacctacagagtggtgtccgtgctgaccgtgctgcaccaggattggctgaacggcaaagagtacaagtgcaaggtgtccaacaaggccctgcctctgcctgaggaaaagaccatcagcaaggccaagggccagcctcgcgaacctcaagtctgtacactgcctcctagccgcgaggaaatgaccaagaaccaggtgtccctgagctgcgccgtgaagggcttttacccttccgatatcgccgtggaatgggagagcaatggccagcctgagaacaactacaagacaacccctcctgtgctggacagcgacggctcattcttcctggtgtccaagctgacagtggacaagagcagatggcagcagggcaacgtgttcagctgcagcgtgctgcatgaagccctgcacagccactacacccagaagtccctgtctctgagccccggcaagtgataaggatccgatctggtactgcatgcacgcaatgctagctgcccctttcccgtcctgggtaccccgagtctcccccgacctcgggtcccaggtatgctcccacctccacctgccccactcaccacctctgctagttccagacacctcccaagcacgcagcaatgcagctcaaaacgcttagcctagccacacccccacgggaaacagcagtgattaacctttagcaataaacgaaagtttaactaagctatactaaccccagggttggtcaatttcgtgccagccacaccctcgagctagcaaaaaaaaaaaaaaaaaaaaaaaaaaaaaagcatatgactaaaaaaaaaaaaaaaaaaaaaaaaaaaaaaaaaaaaaaaaaaaaaaaaaaaaaaaaaaaaaaaaaaaaaa

SEQ ID NO: 691 - RNA, 1907 nt, synthetic construct
  source 1..1907: mol_type = other RNA
agaataaactagtattcttctggtccccacagactcagagagaacccgccaccatggattggatttggagaatcctgttcctcgtgggcgccgctaccggagcccactcccagggcagactgtttcagtctggcgccgaagtgaaaagaccaggcgcctctgtgcggatcagctgcagagctgacgacgacccctacaccgacgacgataccttcaccaagtactggacccactggatcagacaggcccctggacaaagacctgagtggctgggagtgatcagccctcacttcgccagacctatctacagctacaagttccgggacagactgaccctgaccagagacagctctctgaccgccgtgtacctggaactgaagggcctgcagcctgacgacagcggcatctacttttgcgccagagatcccttcggcgacagagcccctcactacaactaccacatggacgtgtggggcggaggcacagccgtgatagttagcagcgcctctacaaagggccctagcgtgttccctctggctcctagcagcaagtcgacatctggcggaacagccgctctgggctgtctggtcaaggactactttcccgagcctgtgacagtgtcctggaactctggcgctctgacaagcggcgtgcacacatttccagccgtgctgcaaagcagcggcctgtactctctgagcagcgtggtcacagtgccaagctctagcctgggcacccagacctacatctgcaatgtgaaccacaagcctagcaacaccaaggtggacaagaaggtggaacccaagagctgcgacaagacccacacctgtcctccatgtcctgctccagaactgctggccggaccttccgtgttcctgtttcctccaaagcctaaggacaccctgatgatcagcagaacccctgaagtgacctgcgtggtggtggatgtgtctcacgaggaccctgaagtgaagttcaattggtacgtggacggcgtggaagtgcacaacgccaagaccaagcctagagaggaacagtacaacagcacctacagagtggtgtccgtgctgaccgtgctgcaccaggattggctgaacggcaaagagtacaagtgcaaggtgtccaacaaggccctgcctgcccctgaggaaaagaccatcagcaaggccaagggccagcctcgcgaacctcaagtctgtacactgcctcctagccgcgaggaaatgaccaagaaccaggtgtccctgagctgcgccgtgaagggcttttacccttccgatatcgccgtggaatgggagagcaatggccagcctgagaacaactacaagacaacccctcctgtgctggacagcgacggctcattcttcctggtgtccaagctgacagtggacaagagcagatggcagcagggcaacgtgttcagctgcagcgtgctgcatgaagccctgcacagccactacacccagaagtccctgtctctgagccccggcaagtgataaggatccgatctggtactgcatgcacgcaatgctagctgcccctttcccgtcctgggtaccccgagtctcccccgacctcgggtcccaggtatgctcccacctccacctgccccactcaccacctctgctagttccagacacctcccaagcacgcagcaatgcagctcaaaacgcttagcctagccacacccccacgggaaacagcagtgattaacctttagcaataaacgaaagtttaactaagctatactaaccccagggttggtcaatttcgtgccagccacaccctcgagctagcaaaaaaaaaaaaaaaaaaaaaaaaaaaaaagcatatgactaaaaaaaaaaaaaaaaaaaaaaaaaaaaaaaaaaaaaaaaaaaaaaaaaaaaaaaaaaaaaaaaaaaaaa

SEQ ID NO: 692 - RNA, 1907 nt, synthetic construct
  source 1..1907: mol_type = other RNA
agaataaactagtattcttctggtccccacagactcagagagaacccgccaccatggattggatttggagaatcctgttcctcgtgggcgccgctaccggagcccactcccagggcagactgtttcagtctggcgccgaagtgaaaagaccaggcgcctctgtgcggatcagctgcagagctgacgacgacccctacaccgacgacgataccttcaccaagtactggacccactggatcagacaggcccctggacaaagacctgagtggctgggagtgatcagccctcacttcgccagacctatctacagctacaagttccgggacagactgaccctgaccagagacagctctctgaccgccgtgtacctggaactgaagggcctgcagcctgacgacagcggcatctacttttgcgccagagatcccttcggcgacagagcccctcactacaactaccacatggacgtgtggggcggaggcacagccgtgatagttagcagcgcctctacaaagggccctagcgtgttccctctggctcctagcagcaagtcgacatctggcggaacagccgctctgggctgtctggtcaaggactactttcccgagcctgtgacagtgtcctggaactctggcgctctgacaagcggcgtgcacacatttccagccgtgctgcaaagcagcggcctgtactctctgagcagcgtggtcacagtgccaagctctagcctgggcacccagacctacatctgcaatgtgaaccacaagcctagcaacaccaaggtggacaagaaggtggaacccaagagctgcgacaagacccacacctgtcctccatgtcctgctccagaactgctggccggaccttccgtgttcctgtttcctccaaagcctaaggacaccctgatgatcagcagaacccctgaagtgacctgcgtggtggtggatgtgtctcacgaggaccctgaagtgaagttcaattggtacgtggacggcgtggaagtgcacaacgccaagaccaagcctagagaggaacagtacaacagcacctacagagtggtgtccgtgctgaccgtgctgcaccaggattggctgaacggcaaagagtacaagtgcaaggtgtccaacaaggccctgcctctgcctgaggaaaagaccatcagcaaggccaagggccagcctagggaaccccaggtttacaccctgcctccatgccgcgaggaaatgaccaagaaccaggtgtccctgtggtgcctggtcaagggcttctacccttccgatatcgccgtggaatgggagagcaatggccagcctgagaacaactacaagacaacccctcctgtgctggacagcgacggctcattcttcctgtacagcaagctgacagtggacaagagcagatggcagcagggcaacgtgttcagctgcagcgtgctgcatgaagccctgcacagccactacacccagaagtccctgtctctgagccccggcaagtgataaggatccgatctggtactgcatgcacgcaatgctagctgcccctttcccgtcctgggtaccccgagtctcccccgacctcgggtcccaggtatgctcccacctccacctgccccactcaccacctctgctagttccagacacctcccaagcacgcagcaatgcagctcaaaacgcttagcctagccacacccccacgggaaacagcagtgattaacctttagcaataaacgaaagtttaactaagctatactaaccccagggttggtcaatttcgtgccagccacaccctcgagctagcaaaaaaaaaaaaaaaaaaaaaaaaaaaaaagcatatgactaaaaaaaaaaaaaaaaaaaaaaaaaaaaaaaaaaaaaaaaaaaaaaaaaaaaaaaaaaaaaaaaaaaaaa

SEQ ID NO: 693 - RNA, 1907 nt, synthetic construct
  source 1..1907: mol_type = other RNA
agaataaactagtattcttctggtccccacagactcagagagaacccgccaccatggattggatttggagaatcctgttcctcgtgggcgccgctaccggagcccactcccagggcagactgtttcagtctggcgccgaagtgaaaagaccaggcgcctctgtgcggatcagctgcagagctgacgacgacccctacaccgacgacgataccttcaccaagtactggacccactggatcagacaggcccctggacaaagacctgagtggctgggagtgatcagccctcacttcgccagacctatctacagctacaagttccgggacagactgaccctgaccagagacagctctctgaccgccgtgtacctggaactgaagggcctgcagcctgacgacagcggcatctacttttgcgccagagatcccttcggcgacagagcccctcactacaactaccacatggacgtgtggggcggaggcacagccgtgatagttagcagcgcctctacaaagggccctagcgtgttccctctggctcctagcagcaagtcgacatctggcggaacagccgctctgggctgtctggtcaaggactactttcccgagcctgtgacagtgtcctggaactctggcgctctgacaagcggcgtgcacacatttccagccgtgctgcaaagcagcggcctgtactctctgagcagcgtggtcacagtgccaagctctagcctgggcacccagacctacatctgcaatgtgaaccacaagcctagcaacaccaaggtggacaagaaggtggaacccaagagctgcgacaagacccacacctgtcctccatgtcctgctccagaactgctggccggaccttccgtgttcctgtttcctccaaagcctaaggacaccctgatgatcagcagaacccctgaagtgacctgcgtggtggtggatgtgtctcacgaggaccctgaagtgaagttcaattggtacgtggacggcgtggaagtgcacaacgccaagaccaagcctagagaggaacagtacaacagcacctacagagtggtgtccgtgctgaccgtgctgcaccaggattggctgaacggcaaagagtacaagtgcaaggtgtccaacaaggccctgcctgcccctgaggaaaagaccatcagcaaggccaagggccagcctagggaaccccaggtttacaccctgcctccatgccgcgaggaaatgaccaagaaccaggtgtccctgtggtgcctggtcaagggcttctacccttccgatatcgccgtggaatgggagagcaatggccagcctgagaacaactacaagacaacccctcctgtgctggacagcgacggctcattcttcctgtacagcaagctgacagtggacaagagcagatggcagcagggcaacgtgttcagctgcagcgtgctgcatgaagccctgcacagccactacacccagaagtccctgtctctgagccccggcaagtgataaggatccgatctggtactgcatgcacgcaatgctagctgcccctttcccgtcctgggtaccccgagtctcccccgacctcgggtcccaggtatgctcccacctccacctgccccactcaccacctctgctagttccagacacctcccaagcacgcagcaatgcagctcaaaacgcttagcctagccacacccccacgggaaacagcagtgattaacctttagcaataaacgaaagtttaactaagctatactaaccccagggttggtcaatttcgtgccagccacaccctcgagctagcaaaaaaaaaaaaaaaaaaaaaaaaaaaaaagcatatgactaaaaaaaaaaaaaaaaaaaaaaaaaaaaaaaaaaaaaaaaaaaaaaaaaaaaaaaaaaaaaaaaaaaaaa

SEQ ID NO: 694 - RNA, 1907 nt, synthetic construct
  source 1..1907: mol_type = other RNA
agaataaactagtattcttctggtccccacagactcagagagaacccgccaccatggattggatttggagaatcctgttcctcgtgggcgccgctaccggagcccactcccagggcagactgtttcagtctggcgccgaagtgaaaagaccaggcgcctctgtgcggatcagctgcagagctgacgacgacccctacaccgacgacgataccttcaccaagtactggacccactggatcagacaggcccctggacaaagacctgagtggctgggagtgatcagccctcacttcgccagacctatctacagctacaagttccgggacagactgaccctgaccagagacagctctctgaccgccgtgtacctggaactgaagggcctgcagcctgacgacagcggcatctacttttgcgccagagatcccttcggcgacagagcccctcactacaactaccacatggacgtgtggggcggaggcacagccgtgatagttagcagcgcctctacaaagggccctagcgtgttccctctggctcctagcagcaagtcgacatctggcggaacagccgctctgggctgtctggtcaaggactactttcccgagcctgtgacagtgtcctggaactctggcgctctgacaagcggcgtgcacacatttccagccgtgctgcaaagcagcggcctgtactctctgagcagcgtggtcacagtgccaagctctagcctgggcacccagacctacatctgcaatgtgaaccacaagcctagcaacaccaaggtggacaagaaggtggaacccaagagctgcgacaagacccacacctgtcctccatgtcctgctccagaactgctcggcggaccttccgtgttcctgtttcctccaaagcctaaggacaccctgatgatcagcagaacccctgaagtgacctgcgtggtggtggatgtgtctcacgaggacccagaagtgaagttcaattggtacgtggacggcgtggaagtgcacaacgccaagaccaagcctagagaggaacagtacaacagcacctacagagtggtgtccgtgctgacagtgctgcaccaggattggctgaacggcaaagagtacaagtgcaaggtgtccaacaaggccctgcctgctcctatcgagaaaaccatcagcaaggccaagggccagcctcgcgaacctcaagtctgtacactgcctcctagccgcgacgaactgaccaagaaccaggtgtccctgagctgcgccgtgaagggcttttacccttccgatatcgccgtggaatgggagagcaatggccagcctgagaacaactacaagacaacccctcctgtgctggacagcgacggctcattcttcctggtgtccaagctgacagtggacaagagcagatggcagcagggcaacgtgttcagctgcagcgtgctgcatgaagccctgcacagccactacacccagaagtccctgtctctgagccccggcaagtgataaggatccgatctggtactgcatgcacgcaatgctagctgcccctttcccgtcctgggtaccccgagtctcccccgacctcgggtcccaggtatgctcccacctccacctgccccactcaccacctctgctagttccagacacctcccaagcacgcagcaatgcagctcaaaacgcttagcctagccacacccccacgggaaacagcagtgattaacctttagcaataaacgaaagtttaactaagctatactaaccccagggttggtcaatttcgtgccagccacaccctcgagctagcaaaaaaaaaaaaaaaaaaaaaaaaaaaaaagcatatgactaaaaaaaaaaaaaaaaaaaaaaaaaaaaaaaaaaaaaaaaaaaaaaaaaaaaaaaaaaaaaaaaaaaaaa

SEQ ID NO: 695 - RNA, 1907 nt, synthetic construct
  source 1..1907: mol_type = other RNA
agaataaactagtattcttctggtccccacagactcagagagaacccgccaccatggattggatttggagaatcctgttcctcgtgggcgccgctaccggagcccactcccagggcagactgtttcagtctggcgccgaagtgaaaagaccaggcgcctctgtgcggatcagctgcagagctgacgacgacccctacaccgacgacgataccttcaccaagtactggacccactggatcagacaggcccctggacaaagacctgagtggctgggagtgatcagccctcacttcgccagacctatctacagctacaagttccgggacagactgaccctgaccagagacagctctctgaccgccgtgtacctggaactgaagggcctgcagcctgacgacagcggcatctacttttgcgccagagatcccttcggcgacagagcccctcactacaactaccacatggacgtgtggggcggaggcacagccgtgatagttagcagcgcctctacaaagggccctagcgtgttccctctggctcctagcagcaagtcgacatctggcggaacagccgctctgggctgtctggtcaaggactactttcccgagcctgtgacagtgtcctggaactctggcgctctgacaagcggcgtgcacacatttccagccgtgctgcaaagcagcggcctgtactctctgagcagcgtggtcacagtgccaagctctagcctgggcacccagacctacatctgcaatgtgaaccacaagcctagcaacaccaaggtggacaagaaggtggaacccaagagctgcgacaagacccacacctgtcctccatgtcctgctccagaactgctggccggaccttccgtgttcctgtttcctccaaagcctaaggacaccctgatgatcagcagaacccctgaagtgacctgcgtggtggtggatgtgtctcacgaggaccctgaagtgaagttcaattggtacgtggacggcgtggaagtgcacaacgccaagaccaagcctagagaggaacagtacaacagcacctacagagtggtgtccgtgctgaccgtgctgcaccaggattggctgaacggcaaagagtacaagtgcaaggtgtccaacaaggccctgcctgcccctatcgaaaagaccatcagcaaggccaagggccagcctagggaaccccaggtttacacactgcctccaagccgcgacgaactgaccaagaaccaggtgtccctgacctgcctcgtgaagggcttctacccttccgatatcgccgtggaatgggagagcaatggccagcctgagaacaactacaagacaacccctcctgtgctggacagcgacggctcattcttcctgtacagcaagctgaccgtggacaagtccagatggcagcagggcaacgtgttcagctgtagcgtgctgcacgaagccctgcacagccactacacccagaaaagcctgtctctgagccccggcaaatgataaggatccgatctggtactgcatgcacgcaatgctagctgcccctttcccgtcctgggtaccccgagtctcccccgacctcgggtcccaggtatgctcccacctccacctgccccactcaccacctctgctagttccagacacctcccaagcacgcagcaatgcagctcaaaacgcttagcctagccacacccccacgggaaacagcagtgattaacctttagcaataaacgaaagtttaactaagctatactaaccccagggttggtcaatttcgtgccagccacaccctcgagctagcaaaaaaaaaaaaaaaaaaaaaaaaaaaaaagcatatgactaaaaaaaaaaaaaaaaaaaaaaaaaaaaaaaaaaaaaaaaaaaaaaaaaaaaaaaaaaaaaaaaaaaaaa

SEQ ID NO: 696 - RNA, 1907 nt, synthetic construct
  source 1..1907: mol_type = other RNA
agaataaactagtattcttctggtccccacagactcagagagaacccgccaccatggattggatttggagaatcctgttcctcgtgggcgccgctaccggagcccactcccagggcagactgtttcagtctggcgccgaagtgaaaagaccaggcgcctctgtgcggatcagctgcagagctgacgacgacccctacaccgacgacgataccttcaccaagtactggacccactggatcagacaggcccctggacaaagacctgagtggctgggagtgatcagccctcacttcgccagacctatctacagctacaagttccgggacagactgaccctgaccagagacagctctctgaccgccgtgtacctggaactgaagggcctgcagcctgacgacagcggcatctacttttgcgccagagatcccttcggcgacagagcccctcactacaactaccacatggacgtgtggggcggaggcacagccgtgatagttagcagcgcctctacaaagggccctagcgtgttccctctggctcctagcagcaagtcgacatctggcggaacagccgctctgggctgtctggtcaaggactactttcccgagcctgtgacagtgtcctggaactctggcgctctgacaagcggcgtgcacacatttccagccgtgctgcaaagcagcggcctgtactctctgagcagcgtggtcacagtgccaagctctagcctgggcacccagacctacatctgcaatgtgaaccacaagcctagcaacaccaaggtggacaagaaggtggaacccaagagctgcgacaagacccacacctgtcctccatgtcctgctccagaactgctgggcggaccttccgtgttcctgtttcctccaaagcctaaggacaccctgatgatcagcagaacccctgaagtgacctgcgtggtggtggatgtgtctcacgaggaccctgaagtgaagttcaattggtacgtggacggcgtggaagtgcacaacgccaagaccaagcctagagaggaacagtacaacagcacctacagagtggtgtccgtgctgaccgtgctgcaccaggattggctgaacggcaaagagtacaagtgcaaggtgtccaacaaggccctgcctgcccctgaggaaaagaccatcagcaaggccaagggccagcctagggaaccccaggtttacacactgcctccaagccgcgacgaactgaccaagaaccaggtgtccctgacctgcctcgtgaagggcttctacccttccgatatcgccgtggaatgggagagcaatggccagcctgagaacaactacaagacaacccctcctgtgctggacagcgacggctcattcttcctgtacagcaagctgaccgtggacaagtccagatggcagcagggcaacgtgttcagctgtagcgtgctgcacgaagccctgcacagccactacacccagaaaagcctgtctctgagccccggcaaatgataaggatccgatctggtactgcatgcacgcaatgctagctgcccctttcccgtcctgggtaccccgagtctcccccgacctcgggtcccaggtatgctcccacctccacctgccccactcaccacctctgctagttccagacacctcccaagcacgcagcaatgcagctcaaaacgcttagcctagccacacccccacgggaaacagcagtgattaacctttagcaataaacgaaagtttaactaagctatactaaccccagggttggtcaatttcgtgccagccacaccctcgagctagcaaaaaaaaaaaaaaaaaaaaaaaaaaaaaagcatatgactaaaaaaaaaaaaaaaaaaaaaaaaaaaaaaaaaaaaaaaaaaaaaaaaaaaaaaaaaaaaaaaaaaaaaa

SEQ ID NO: 697 - RNA, 1907 nt, synthetic construct
  source 1..1907: mol_type = other RNA
agaataaactagtattcttctggtccccacagactcagagagaacccgccaccatggattggatttggagaatcctgttcctcgtgggcgccgctaccggagcccactcccagggcagactgtttcagtctggcgccgaagtgaaaagaccaggcgcctctgtgcggatcagctgcagagctgacgacgacccctacaccgacgacgataccttcaccaagtactggacccactggatcagacaggcccctggacaaagacctgagtggctgggagtgatcagccctcacttcgccagacctatctacagctacaagttccgggacagactgaccctgaccagagacagctctctgaccgccgtgtacctggaactgaagggcctgcagcctgacgacagcggcatctacttttgcgccagagatcccttcggcgacagagcccctcactacaactaccacatggacgtgtggggcggaggcacagccgtgatagttagcagcgcctctacaaagggccctagcgtgttccctctggctcctagcagcaagtcgacatctggcggaacagccgctctgggctgtctggtcaaggactactttcccgagcctgtgacagtgtcctggaactctggcgctctgacaagcggcgtgcacacatttccagccgtgctgcaaagcagcggcctgtactctctgagcagcgtggtcacagtgccaagctctagcctgggcacccagacctacatctgcaatgtgaaccacaagcctagcaacaccaaggtggacaagaaggtggaacccaagagctgcgacaagacccacacctgtcctccatgtcctgctccagaactgctggccggaccttccgtgttcctgtttcctccaaagcctaaggacaccctgatgatcagcagaacccctgaagtgacctgcgtggtggtggatgtgtctcacgaggaccctgaagtgaagttcaattggtacgtggacggcgtggaagtgcacaacgccaagaccaagcctagagaggaacagtacaacagcacctacagagtggtgtccgtgctgaccgtgctgcaccaggattggctgaacggcaaagagtacaagtgcaaggtgtccaacaaggccctgcctctgcctgaggaaaagaccatcagcaaggccaagggccagcctcgcgaacctcaagtctgtacactgcctcctagccgcgacgaactgaccaagaaccaggtgtccctgagctgcgccgtgaagggcttttacccttccgatatcgccgtggaatgggagagcaatggccagcctgagaacaactacaagacaacccctcctgtgctggacagcgacggctcattcttcctggtgtccaagctgacagtggacaagagcagatggcagcagggcaacgtgttcagctgcagcgtgctgcatgaagccctgcacagccactacacccagaagtccctgtctctgagccccggcaagtgataaggatccgatctggtactgcatgcacgcaatgctagctgcccctttcccgtcctgggtaccccgagtctcccccgacctcgggtcccaggtatgctcccacctccacctgccccactcaccacctctgctagttccagacacctcccaagcacgcagcaatgcagctcaaaacgcttagcctagccacacccccacgggaaacagcagtgattaacctttagcaataaacgaaagtttaactaagctatactaaccccagggttggtcaatttcgtgccagccacaccctcgagctagcaaaaaaaaaaaaaaaaaaaaaaaaaaaaaagcatatgactaaaaaaaaaaaaaaaaaaaaaaaaaaaaaaaaaaaaaaaaaaaaaaaaaaaaaaaaaaaaaaaaaaaaaa

SEQ ID NO: 698 - RNA, 1907 nt, synthetic construct
  source 1..1907: mol_type = other RNA
agaataaactagtattcttctggtccccacagactcagagagaacccgccaccatggattggatttggagaatcctgttcctcgtgggcgccgctaccggagcccactcccagggcagactgtttcagtctggcgccgaagtgaaaagaccaggcgcctctgtgcggatcagctgcagagctgacgacgacccctacaccgacgacgataccttcaccaagtactggacccactggatcagacaggcccctggacaaagacctgagtggctgggagtgatcagccctcacttcgccagacctatctacagctacaagttccgggacagactgaccctgaccagagacagctctctgaccgccgtgtacctggaactgaagggcctgcagcctgacgacagcggcatctacttttgcgccagagatcccttcggcgacagagcccctcactacaactaccacatggacgtgtggggcggaggcacagccgtgatagttagcagcgcctctacaaagggccctagcgtgttccctctggctcctagcagcaagtcgacatctggcggaacagccgctctgggctgtctggtcaaggactactttcccgagcctgtgacagtgtcctggaactctggcgctctgacaagcggcgtgcacacatttccagccgtgctgcaaagcagcggcctgtactctctgagcagcgtggtcacagtgccaagctctagcctgggcacccagacctacatctgcaatgtgaaccacaagcctagcaacaccaaggtggacaagaaggtggaacccaagagctgcgacaagacccacacctgtcctccatgtcctgctccagaactgctggccggaccttccgtgttcctgtttcctccaaagcctaaggacaccctgatgatcagcagaacccctgaagtgacctgcgtggtggtggatgtgtctcacgaggaccctgaagtgaagttcaattggtacgtggacggcgtggaagtgcacaacgccaagaccaagcctagagaggaacagtacaacagcacctacagagtggtgtccgtgctgaccgtgctgcaccaggattggctgaacggcaaagagtacaagtgcaaggtgtccaacaaggccctgcctgcccctgaggaaaagaccatcagcaaggccaagggccagcctcgcgaacctcaagtctgtacactgcctcctagccgcgacgaactgaccaagaaccaggtgtccctgagctgcgccgtgaagggcttttacccttccgatatcgccgtggaatgggagagcaatggccagcctgagaacaactacaagacaacccctcctgtgctggacagcgacggctcattcttcctggtgtccaagctgacagtggacaagagcagatggcagcagggcaacgtgttcagctgcagcgtgctgcatgaagccctgcacagccactacacccagaagtccctgtctctgagccccggcaagtgataaggatccgatctggtactgcatgcacgcaatgctagctgcccctttcccgtcctgggtaccccgagtctcccccgacctcgggtcccaggtatgctcccacctccacctgccccactcaccacctctgctagttccagacacctcccaagcacgcagcaatgcagctcaaaacgcttagcctagccacacccccacgggaaacagcagtgattaacctttagcaataaacgaaagtttaactaagctatactaaccccagggttggtcaatttcgtgccagccacaccctcgagctagcaaaaaaaaaaaaaaaaaaaaaaaaaaaaaagcatatgactaaaaaaaaaaaaaaaaaaaaaaaaaaaaaaaaaaaaaaaaaaaaaaaaaaaaaaaaaaaaaaaaaaaaaa

SEQ ID NO: 699 - RNA, 1907 nt, synthetic construct
  source 1..1907: mol_type = other RNA
agaataaactagtattcttctggtccccacagactcagagagaacccgccaccatggattggatttggagaatcctgttcctcgtgggcgccgctaccggagcccactcccagggcagactgtttcagtctggcgccgaagtgaaaagaccaggcgcctctgtgcggatcagctgcagagctgacgacgacccctacaccgacgacgataccttcaccaagtactggacccactggatcagacaggcccctggacaaagacctgagtggctgggagtgatcagccctcacttcgccagacctatctacagctacaagttccgggacagactgaccctgaccagagacagctctctgaccgccgtgtacctggaactgaagggcctgcagcctgacgacagcggcatctacttttgcgccagagatcccttcggcgacagagcccctcactacaactaccacatggacgtgtggggcggaggcacagccgtgatagttagcagcgcctctacaaagggccctagcgtgttccctctggctcctagcagcaagtcgacatctggcggaacagccgctctgggctgtctggtcaaggactactttcccgagcctgtgacagtgtcctggaactctggcgctctgacaagcggcgtgcacacatttccagccgtgctgcaaagcagcggcctgtactctctgagcagcgtggtcacagtgccaagctctagcctgggcacccagacctacatctgcaatgtgaaccacaagcctagcaacaccaaggtggacaagaaggtggaacccaagagctgcgacaagacccacacctgtcctccatgtcctgctccagaactgctggccggaccttccgtgttcctgtttcctccaaagcctaaggacaccctgatgatcagcagaacccctgaagtgacctgcgtggtggtggatgtgtctcacgaggaccctgaagtgaagttcaattggtacgtggacggcgtggaagtgcacaacgccaagaccaagcctagagaggaacagtacaacagcacctacagagtggtgtccgtgctgaccgtgctgcaccaggattggctgaacggcaaagagtacaagtgcaaggtgtccaacaaggccctgcctctgcctgaggaaaagaccatcagcaaggccaagggccagcctagggaaccccaggtttacaccctgcctccatgccgcgacgaactgaccaagaaccaggtgtccctgtggtgcctggtcaagggcttctacccttccgatatcgccgtggaatgggagagcaatggccagcctgagaacaactacaagacaacccctcctgtgctggacagcgacggctcattcttcctgtacagcaagctgacagtggacaagagcagatggcagcagggcaacgtgttcagctgcagcgtgctgcatgaagccctgcacagccactacacccagaagtccctgtctctgagccccggcaagtgataaggatccgatctggtactgcatgcacgcaatgctagctgcccctttcccgtcctgggtaccccgagtctcccccgacctcgggtcccaggtatgctcccacctccacctgccccactcaccacctctgctagttccagacacctcccaagcacgcagcaatgcagctcaaaacgcttagcctagccacacccccacgggaaacagcagtgattaacctttagcaataaacgaaagtttaactaagctatactaaccccagggttggtcaatttcgtgccagccacaccctcgagctagcaaaaaaaaaaaaaaaaaaaaaaaaaaaaaagcatatgactaaaaaaaaaaaaaaaaaaaaaaaaaaaaaaaaaaaaaaaaaaaaaaaaaaaaaaaaaaaaaaaaaaaaaa

SEQ ID NO: 700 - RNA, 1919 nt, synthetic construct
  source 1..1919: mol_type = other RNA
agaataaactagtattcttctggtccccacagactcagagagaacccgccaccatggattggatttggagaatcctgttcctcgtgggcgccgctaccggagcccactcccagggcagactgtttcagtctggcgccgaagtgaaaagaccaggcgcctctgtgcggatcagctgcagagctgacgacgacccctacaccgacgacgataccttcaccaagtactggacccactggatcagacaggcccctggacaaagacctgagtggctgggagtgatcagccctcacttcgccagacctatctacagctacaagttccgggacagactgaccctgaccagagacagctctctgaccgccgtgtacctggaactgaagggcctgcagcctgacgacagcggcatctacttttgcgccagagatcccttcggcgacagagcccctcactacaactaccacatggacgtgtggggcggaggcacagccgtgatagttagcagcgcatctgtggccgctcctagcgtgttcatcttcccacctagcgacgaggaactgaagtctggcacagccagcgtcgtgtgcctgctgaacaacttctaccccagagaagccaaggtgcagtggaaggtggacaacgccctgcagagcggcaatagccaagagagcgtgaccgagcaggacagcaaggactctacctacagcctgagcagcaccctgacactgagcaaggccgactacgagaagcacaaagtgtacgcctgcgaagtgacccaccagggcctttctagccctgtgaccaagagcttcaaccggggcgagtgcgataagacccacacctgtcctccatgtccagctccagaactgctcggcggaccttccgtgttcctgtttcctccaaagcctaaggacaccctgatgatcagcagaacccctgaagtgacctgcgtggtggtggatgtgtctcacgaggacccagaagtgaagttcaattggtacgtggacggcgtggaagtgcacaacgccaagaccaagcctagagaggaacagtacaacagcacctacagagtggtgtccgtgctgacagtgctgcaccaggattggctgaacggcaaagagtacaagtgcaaggtgtccaacaaggccctgcctgctcctatcgagaaaaccatcagcaaggccaagggccagcctagggaaccccaggtttacacactgcctccaagccgcgaggaaatgaccaagaaccaggtgtccctgacctgcctcgtgaagggcttctacccttccgatatcgccgtggaatgggagagcaatggccagcctgagaacaactacaagacaacccctcctgtgctggacagcgacggctcattcttcctgtacagcaagctgactgtggataagtcccggtggcagcagggcaacgtgttcagctgttctgtgatgcacgaagccctgcacaaccactacacccagaaaagcctgtctctgagccccggcaagtgataaggatccgatctggtactgcatgcacgcaatgctagctgcccctttcccgtcctgggtaccccgagtctcccccgacctcgggtcccaggtatgctcccacctccacctgccccactcaccacctctgctagttccagacacctcccaagcacgcagcaatgcagctcaaaacgcttagcctagccacacccccacgggaaacagcagtgattaacctttagcaataaacgaaagtttaactaagctatactaaccccagggttggtcaatttcgtgccagccacaccctcgagctagcaaaaaaaaaaaaaaaaaaaaaaaaaaaaaagcatatgactaaaaaaaaaaaaaaaaaaaaaaaaaaaaaaaaaaaaaaaaaaaaaaaaaaaaaaaaaaaaaaaaaaaaaa

SEQ ID NO: 701 - RNA, 1919 nt, synthetic construct; identical to SEQ ID NO: 700
  source 1..1919: mol_type = other RNA

SEQ ID NO: 702 - RNA, 1919 nt, synthetic construct; identical to SEQ ID NO: 459
  source 1..1919: mol_type = other RNA

SEQ ID NO: 703 - RNA, 1919 nt, synthetic construct
  source 1..1919: mol_type = other RNA
agaataaactagtattcttctggtccccacagactcagagagaacccgccaccatggattggatttggagaatcctgttcctcgtgggcgccgctaccggagcccactcccagggcagactgtttcagtctggcgccgaagtgaaaagaccaggcgcctctgtgcggatcagctgcagagctgacgacgacccctacaccgacgacgataccttcaccaagtactggacccactggatcagacaggcccctggacaaagacctgagtggctgggagtgatcagccctcacttcgccagacctatctacagctacaagttccgggacagactgaccctgaccagagacagctctctgaccgccgtgtacctggaactgaagggcctgcagcctgacgacagcggcatctacttttgcgccagagatcccttcggcgacagagcccctcactacaactaccacatggacgtgtggggcggaggcacagccgtgatagttagcagcgcatctgtggccgctcctagcgtgttcatcttcccacctagcgacgaggaactgaagtctggcacagccagcgtcgtgtgcctgctgaacaacttctaccccagagaagccaaggtgcagtggaaggtggacaacgccctgcagagcggcaatagccaagagagcgtgaccgagcaggacagcaaggactctacctacagcctgagcagcaccctgacactgagcaaggccgactacgagaagcacaaagtgtacgcctgcgaagtgacccaccagggcctttctagccctgtgaccaagagcttcaaccggggcgagtgcgataagacccacacctgtcctccatgtccagctccagaactgctcggcggaccttccgtgttcctgtttcctccaaagcctaaggacaccctgatgatcagcagaacccctgaagtgacctgcgtggtggtggatgtgtctcacgaggacccagaagtgaagttcaattggtacgtggacggcgtggaagtgcacaacgccaagaccaagcctagagaggaacagtacaacagcacctacagagtggtgtccgtgctgacagtgctgcaccaggattggctgaacggcaaagagtacaagtgcaaggtgtccaacaaggccctgcctgctcctatcgagaaaaccatcagcaaggccaagggccagcctagggaaccccaggtttacacactgcctccaagccgcgacgaactgaccaagaaccaggtgtccctgacctgcctcgtgaagggcttctacccttccgatatcgccgtggaatgggagagcaatggccagcctgagaacaactacaagacaacccctcctgtgctggacagcgacggctcattcttcctgtacagcaagctgactgtggataagtcccggtggcagcagggcaacgtgttcagctgttctgtgatgcacgaagccctgcacaaccactacacccagaaaagcctgtctctgagccccggcaagtgataaggatccgatctggtactgcatgcacgcaatgctagctgcccctttcccgtcctgggtaccccgagtctcccccgacctcgggtcccaggtatgctcccacctccacctgccccactcaccacctctgctagttccagacacctcccaagcacgcagcaatgcagctcaaaacgcttagcctagccacacccccacgggaaacagcagtgattaacctttagcaataaacgaaagtttaactaagctatactaaccccagggttggtcaatttcgtgccagccacaccctcgagctagcaaaaaaaaaaaaaaaaaaaaaaaaaaaaaagcatatgactaaaaaaaaaaaaaaaaaaaaaaaaaaaaaaaaaaaaaaaaaaaaaaaaaaaaaaaaaaaaaaaaaaaaaa

SEQ ID NO: 704 - RNA, 1919 nt, synthetic construct
  source 1..1919: mol_type = other RNA
agaataaactagtattcttctggtccccacagactcagagagaacccgccaccatggattggatttggagaatcctgttcctcgtgggcgccgctaccggagcccactcccagggcagactgtttcagtctggcgccgaagtgaaaagaccaggcgcctctgtgcggatcagctgcagagctgacgacgacccctacaccgacgacgataccttcaccaagtactggacccactggatcagacaggcccctggacaaagacctgagtggctgggagtgatcagccctcacttcgccagacctatctacagctacaagttccgggacagactgaccctgaccagagacagctctctgaccgccgtgtacctggaactgaagggcctgcagcctgacgacagcggcatctacttttgcgccagagatcccttcggcgacagagcccctcactacaactaccacatggacgtgtggggcggaggcacagccgtgatagttagcagcgcatctgtggccgctcctagcgtgttcatcttcccacctagcgacgaggaactgaagtctggcacagccagcgtcgtgtgcctgctgaacaacttctaccccagagaagccaaggtgcagtggaaggtggacaacgccctgcagagcggcaatagccaagagagcgtgaccgagcaggacagcaaggactctacctacagcctgagcagcaccctgacactgagcaaggccgactacgagaagcacaaagtgtacgcctgcgaagtgacccaccagggcctttctagccctgtgaccaagagcttcaaccggggcgagtgcgataagacccacacctgtcctccatgtccagctccagaactgctcggcggaccttccgtgttcctgtttcctccaaagcctaaggacaccctgatgatcagcagaacccctgaagtgacctgcgtggtggtggatgtgtctcacgaggacccagaagtgaagttcaattggtacgtggacggcgtggaagtgcacaacgccaagaccaagcctagagaggaacagtacaacagcacctacagagtggtgtccgtgctgacagtgctgcaccaggattggctgaacggcaaagagtacaagtgcaaggtgtccaacaaggccctgcctgctcctatcgagaaaaccatcagcaaggccaagggccagcctagggaaccccaggtttacacactgcctccaagccgcgacgaactgaccaagaaccaggtgtccctgacctgcctcgtgaagggcttctacccttccgatatcgccgtggaatgggagagcaatggccagcctgagaacaactacaagacaacccctcctgtgctggacagcgacggctcattcttcctgtacagcaagctgaccgtggacaagtccagatggcagcagggcaacgtgttcagctgtagcgtgctgcacgaagccctgcacagccactacacccagaaaagcctgtctctgagccccggcaaatgataaggatccgatctggtactgcatgcacgcaatgctagctgcccctttcccgtcctgggtaccccgagtctcccccgacctcgggtcccaggtatgctcccacctccacctgccccactcaccacctctgctagttccagacacctcccaagcacgcagcaatgcagctcaaaacgcttagcctagccacacccccacgggaaacagcagtgattaacctttagcaataaacgaaagtttaactaagctatactaaccccagggttggtcaatttcgtgccagccacaccctcgagctagcaaaaaaaaaaaaaaaaaaaaaaaaaaaaaagcatatgactaaaaaaaaaaaaaaaaaaaaaaaaaaaaaaaaaaaaaaaaaaaaaaaaaaaaaaaaaaaaaaaaaaaaaa

SEQ ID NO: 705 - RNA, 1919 nt, synthetic construct
  source 1..1919: mol_type = other RNA
agaataaactagtattcttctggtccccacagactcagagagaacccgccaccatggattggatttggagaatcctgttcctcgtgggcgccgctaccggagcccactcccagggcagactgtttcagtctggcgccgaagtgaaaagaccaggcgcctctgtgcggatcagctgcagagctgacgacgacccctacaccgacgacgataccttcaccaagtactggacccactggatcagacaggcccctggacaaagacctgagtggctgggagtgatcagccctcacttcgccagacctatctacagctacaagttccgggacagactgaccctgaccagagacagctctctgaccgccgtgtacctggaactgaagggcctgcagcctgacgacagcggcatctacttttgcgccagagatcccttcggcgacagagcccctcactacaactaccacatggacgtgtggggcggaggcacagccgtgatagttagcagcgcatctgtggccgctcctagcgtgttcatcttcccacctagcgacgaggaactgaagtctggcacagccagcgtcgtgtgcctgctgaacaacttctaccccagagaagccaaggtgcagtggaaggtggacaacgccctgcagagcggcaatagccaagagagcgtgaccgagcaggacagcaaggactctacctacagcctgagcagcaccctgacactgagcaaggccgactacgagaagcacaaagtgtacgcctgcgaagtgacccaccagggcctttctagccctgtgaccaagagcttcaaccggggcgagtgcgataagacccacacctgtcctccatgtccagctccagaactgctcggcggaccttccgtgttcctgtttcctccaaagcctaaggacaccctgatgatcagcagaacccctgaagtgacctgcgtggtggtggatgtgtctcacgaggacccagaagtgaagttcaattggtacgtggacggcgtggaagtgcacaacgccaagaccaagcctagagaggaacagtacaacagcacctacagagtggtgtccgtgctgacagtgctgcaccaggattggctgaacggcaaagagtacaagtgcaaggtgtccaacaaggccctgcctgctcctatcgagaaaaccatcagcaaggccaagggccagcctcgcgaacctcaagtctgtacactgcctcctagccgcgaggaaatgaccaagaaccaggtgtccctgagctgcgccgtgaagggcttttacccttccgatatcgccgtggaatgggagagcaatggccagcctgagaacaactacaagacaacccctcctgtgctggacagcgacggctcattcttcctggtgtccaagctgacagtggacaagagcagatggcagcagggcaacgtgttcagctgcagcgtgctgcatgaagccctgcacagccactacacccagaagtccctgtctctgagccccggcaagtgataaggatccgatctggtactgcatgcacgcaatgctagctgcccctttcccgtcctgggtaccccgagtctcccccgacctcgggtcccaggtatgctcccacctccacctgccccactcaccacctctgctagttccagacacctcccaagcacgcagcaatgcagctcaaaacgcttagcctagccacacccccacgggaaacagcagtgattaacctttagcaataaacgaaagtttaactaagctatactaaccccagggttggtcaatttcgtgccagccacaccctcgagctagcaaaaaaaaaaaaaaaaaaaaaaaaaaaaaagcatatgactaaaaaaaaaaaaaaaaaaaaaaaaaaaaaaaaaaaaaaaaaaaaaaaaaaaaaaaaaaaaaaaaaaaaaa

SEQ ID NO: 706 - RNA, 1919 nt, synthetic construct
  source 1..1919: mol_type = other RNA
agaataaactagtattcttctggtccccacagactcagagagaacccgccaccatggattggatttggagaatcctgttcctcgtgggcgccgctaccggagcccactcccagggcagactgtttcagtctggcgccgaagtgaaaagaccaggcgcctctgtgcggatcagctgcagagctgacgacgacccctacaccgacgacgataccttcaccaagtactggacccactggatcagacaggcccctggacaaagacctgagtggctgggagtgatcagccctcacttcgccagacctatctacagctacaagttccgggacagactgaccctgaccagagacagctctctgaccgccgtgtacctggaactgaagggcctgcagcctgacgacagcggcatctacttttgcgccagagatcccttcggcgacagagcccctcactacaactaccacatggacgtgtggggcggaggcacagccgtgatagttagcagcgcatctgtggccgctcctagcgtgttcatcttcccacctagcgacgaggaactgaagtctggcacagccagcgtcgtgtgcctgctgaacaacttctaccccagagaagccaaggtgcagtggaaggtggacaacgccctgcagagcggcaatagccaagagagcgtgaccgagcaggacagcaaggactctacctacagcctgagcagcaccctgacactgagcaaggccgactacgagaagcacaaagtgtacgcctgcgaagtgacccaccagggcctttctagccctgtgaccaagagcttcaaccggggcgagtgcgataagacccacacctgtcctccatgtccagctccagaactgctggccggaccttccgtgttcctgtttcctccaaagcctaaggacaccctgatgatcagcagaacccctgaagtgacctgcgtggtggtggatgtgtctcacgaggaccctgaagtgaagttcaattggtacgtggacggcgtggaagtgcacaacgccaagaccaagcctagagaggaacagtacaacagcacctacagagtggtgtccgtgctgaccgtgctgcaccaggattggctgaacggcaaagagtacaagtgcaaggtgtccaacaaggccctgcctctgcctgaggaaaagaccatcagcaaggccaagggccagcctcgcgaacctcaagtctgtacactgcctcctagccgcgaggaaatgaccaagaaccaggtgtccctgagctgcgccgtgaagggcttttacccttccgatatcgccgtggaatgggagagcaatggccagcctgagaacaactacaagacaacccctcctgtgctggacagcgacggctcattcttcctggtgtccaagctgacagtggacaagagcagatggcagcagggcaacgtgttcagctgcagcgtgctgcatgaagccctgcacagccactacacccagaagtccctgtctctgagccccggcaagtgataaggatccgatctggtactgcatgcacgcaatgctagctgcccctttcccgtcctgggtaccccgagtctcccccgacctcgggtcccaggtatgctcccacctccacctgccccactcaccacctctgctagttccagacacctcccaagcacgcagcaatgcagctcaaaacgcttagcctagccacacccccacgggaaacagcagtgattaacctttagcaataaacgaaagtttaactaagctatactaaccccagggttggtcaatttcgtgccagccacaccctcgagctagcaaaaaaaaaaaaaaaaaaaaaaaaaaaaaagcatatgactaaaaaaaaaaaaaaaaaaaaaaaaaaaaaaaaaaaaaaaaaaaaaaaaaaaaaaaaaaaaaaaaaaaaaa

SEQ ID NO: 707 - RNA, 1919 nt, synthetic construct
  source 1..1919: mol_type = other RNA
agaataaactagtattcttctggtccccacagactcagagagaacccgccaccatggattggatttggagaatcctgttcctcgtgggcgccgctaccggagcccactcccagggcagactgtttcagtctggcgccgaagtgaaaagaccaggcgcctctgtgcggatcagctgcagagctgacgacgacccctacaccgacgacgataccttcaccaagtactggacccactggatcagacaggcccctggacaaagacctgagtggctgggagtgatcagccctcacttcgccagacctatctacagctacaagttccgggacagactgaccctgaccagagacagctctctgaccgccgtgtacctggaactgaagggcctgcagcctgacgacagcggcatctacttttgcgccagagatcccttcggcgacagagcccctcactacaactaccacatggacgtgtggggcggaggcacagccgtgatagttagcagcgcatctgtggccgctcctagcgtgttcatcttcccacctagcgacgaggaactgaagtctggcacagccagcgtcgtgtgcctgctgaacaacttctaccccagagaagccaaggtgcagtggaaggtggacaacgccctgcagagcggcaatagccaagagagcgtgaccgagcaggacagcaaggactctacctacagcctgagcagcaccctgacactgagcaaggccgactacgagaagcacaaagtgtacgcctgcgaagtgacccaccagggcctttctagccctgtgaccaagagcttcaaccggggcgagtgcgataagacccacacctgtcctccatgtccagctccagaactgctggccggaccttccgtgttcctgtttcctccaaagcctaaggacaccctgatgatcagcagaacccctgaagtgacctgcgtggtggtggatgtgtctcacgaggaccctgaagtgaagttcaattggtacgtggacggcgtggaagtgcacaacgccaagaccaagcctagagaggaacagtacaacagcacctacagagtggtgtccgtgctgaccgtgctgcaccaggattggctgaacggcaaagagtacaagtgcaaggtgtccaacaaggccctgcctgcccctgaggaaaagaccatcagcaaggccaagggccagcctcgcgaacctcaagtctgtacactgcctcctagccgcgaggaaatgaccaagaaccaggtgtccctgagctgcgccgtgaagggcttttacccttccgatatcgccgtggaatgggagagcaatggccagcctgagaacaactacaagacaacccctcctgtgctggacagcgacggctcattcttcctggtgtccaagctgacagtggacaagagcagatggcagcagggcaacgtgttcagctgcagcgtgctgcatgaagccctgcacagccactacacccagaagtccctgtctctgagccccggcaagtgataaggatccgatctggtactgcatgcacgcaatgctagctgcccctttcccgtcctgggtaccccgagtctcccccgacctcgggtcccaggtatgctcccacctccacctgccccactcaccacctctgctagttccagacacctcccaagcacgcagcaatgcagctcaaaacgcttagcctagccacacccccacgggaaacagcagtgattaacctttagcaataaacgaaagtttaactaagctatactaaccccagggttggtcaatttcgtgccagccacaccctcgagctagcaaaaaaaaaaaaaaaaaaaaaaaaaaaaaagcatatgactaaaaaaaaaaaaaaaaaaaaaaaaaaaaaaaaaaaaaaaaaaaaaaaaaaaaaaaaaaaaaaaaaaaaaa

SEQ ID NO: 708 - RNA, 1919 nt, synthetic construct
  source 1..1919: mol_type = other RNA
agaataaactagtattcttctggtccccacagactcagagagaacccgccaccatggattggatttggagaatcctgttcctcgtgggcgccgctaccggagcccactcccagggcagactgtttcagtctggcgccgaagtgaaaagaccaggcgcctctgtgcggatcagctgcagagctgacgacgacccctacaccgacgacgataccttcaccaagtactggacccactggatcagacaggcccctggacaaagacctgagtggctgggagtgatcagccctcacttcgccagacctatctacagctacaagttccgggacagactgaccctgaccagagacagctctctgaccgccgtgtacctggaactgaagggcctgcagcctgacgacagcggcatctacttttgcgccagagatcccttcggcgacagagcccctcactacaactaccacatggacgtgtggggcggaggcacagccgtgatagttagcagcgcatctgtggccgctcctagcgtgttcatcttcccacctagcgacgaggaactgaagtctggcacagccagcgtcgtgtgcctgctgaacaacttctaccccagagaagccaaggtgcagtggaaggtggacaacgccctgcagagcggcaatagccaagagagcgtgaccgagcaggacagcaaggactctacctacagcctgagcagcaccctgacactgagcaaggccgactacgagaagcacaaagtgtacgcctgcgaagtgacccaccagggcctttctagccctgtgaccaagagcttcaaccggggcgagtgcgataagacccacacctgtcctccatgtccagctccagaactgctcggcggaccttccgtgttcctgtttcctccaaagcctaaggacaccctgatgatcagcagaacccctgaagtgacctgcgtggtggtggatgtgtctcacgaggacccagaagtgaagttcaattggtacgtggacggcgtggaagtgcacaacgccaagaccaagcctagagaggaacagtacaacagcacctacagagtggtgtccgtgctgacagtgctgcaccaggattggctgaacggcaaagagtacaagtgcaaggtgtccaacaaggccctgcctgctcctatcgagaaaaccatcagcaaggccaagggccagcctagggaaccccaggtttacaccctgcctccatgccgcgaggaaatgaccaagaaccaggtgtccctgtggtgcctggtcaagggcttctacccttccgatatcgccgtggaatgggagagcaatggccagcctgagaacaactacaagacaacccctcctgtgctggacagcgacggctcattcttcctgtacagcaagctgacagtggacaagagcagatggcagcagggcaacgtgttcagctgcagcgtgctgcatgaagccctgcacagccactacacccagaagtccctgtctctgagccccggcaagtgataaggatccgatctggtactgcatgcacgcaatgctagctgcccctttcccgtcctgggtaccccgagtctcccccgacctcgggtcccaggtatgctcccacctccacctgccccactcaccacctctgctagttccagacacctcccaagcacgcagcaatgcagctcaaaacgcttagcctagccacacccccacgggaaacagcagtgattaacctttagcaataaacgaaagtttaactaagctatactaaccccagggttggtcaatttcgtgccagccacaccctcgagctagcaaaaaaaaaaaaaaaaaaaaaaaaaaaaaagcatatgactaaaaaaaaaaaaaaaaaaaaaaaaaaaaaaaaaaaaaaaaaaaaaaaaaaaaaaaaaaaaaaaaaaaaaa

SEQ ID NO: 709 - RNA, 1919 nt, synthetic construct
  source 1..1919: mol_type = other RNA
agaataaactagtattcttctggtccccacagactcagagagaacccgccaccatggattggatttggagaatcctgttcctcgtgggcgccgctaccggagcccactcccagggcagactgtttcagtctggcgccgaagtgaaaagaccaggcgcctctgtgcggatcagctgcagagctgacgacgacccctacaccgacgacgataccttcaccaagtactggacccactggatcagacaggcccctggacaaagacctgagtggctgggagtgatcagccctcacttcgccagacctatctacagctacaagttccgggacagactgaccctgaccagagacagctctctgaccgccgtgtacctggaactgaagggcctgcagcctgacgacagcggcatctacttttgcgccagagatcccttcggcgacagagcccctcactacaactaccacatggacgtgtggggcggaggcacagccgtgatagttagcagcgcatctgtggccgctcctagcgtgttcatcttcccacctagcgacgaggaactgaagtctggcacagccagcgtcgtgtgcctgctgaacaacttctaccccagagaagccaaggtgcagtggaaggtggacaacgccctgcagagcggcaatagccaagagagcgtgaccgagcaggacagcaaggactctacctacagcctgagcagcaccctgacactgagcaaggccgactacgagaagcacaaagtgtacgcctgcgaagtgacccaccagggcctttctagccctgtgaccaagagcttcaaccggggcgagtgcgataagacccacacctgtcctccatgtccagctccagaactgctggccggaccttccgtgttcctgtttcctccaaagcctaaggacaccctgatgatcagcagaacccctgaagtgacctgcgtggtggtggatgtgtctcacgaggaccctgaagtgaagttcaattggtacgtggacggcgtggaagtgcacaacgccaagaccaagcctagagaggaacagtacaacagcacctacagagtggtgtccgtgctgaccgtgctgcaccaggattggctgaacggcaaagagtacaagtgcaaggtgtccaacaaggccctgcctctgcctgaggaaaagaccatcagcaaggccaagggccagcctagggaaccccaggtttacaccctgcctccatgccgcgaggaaatgaccaagaaccaggtgtccctgtggtgcctggtcaagggcttctacccttccgatatcgccgtggaatgggagagcaatggccagcctgagaacaactacaagacaacccctcctgtgctggacagcgacggctcattcttcctgtacagcaagctgacagtggacaagagcagatggcagcagggcaacgtgttcagctgcagcgtgctgcatgaagccctgcacagccactacacccagaagtccctgtctctgagccccggcaagtgataaggatccgatctggtactgcatgcacgcaatgctagctgcccctttcccgtcctgggtaccccgagtctcccccgacctcgggtcccaggtatgctcccacctccacctgccccactcaccacctctgctagttccagacacctcccaagcacgcagcaatgcagctcaaaacgcttagcctagccacacccccacgggaaacagcagtgattaacctttagcaataaacgaaagtttaactaagctatactaaccccagggttggtcaatttcgtgccagccacaccctcgagctagcaaaaaaaaaaaaaaaaaaaaaaaaaaaaaagcatatgactaaaaaaaaaaaaaaaaaaaaaaaaaaaaaaaaaaaaaaaaaaaaaaaaaaaaaaaaaaaaaaaaaaaaaa

SEQ ID NO: 710 - RNA, 1919 nt, synthetic construct
  source 1..1919: mol_type = other RNA
agaataaactagtattcttctggtccccacagactcagagagaacccgccaccatggattggatttggagaatcctgttcctcgtgggcgccgctaccggagcccactcccagggcagactgtttcagtctggcgccgaagtgaaaagaccaggcgcctctgtgcggatcagctgcagagctgacgacgacccctacaccgacgacgataccttcaccaagtactggacccactggatcagacaggcccctggacaaagacctgagtggctgggagtgatcagccctcacttcgccagacctatctacagctacaagttccgggacagactgaccctgaccagagacagctctctgaccgccgtgtacctggaactgaagggcctgcagcctgacgacagcggcatctacttttgcgccagagatcccttcggcgacagagcccctcactacaactaccacatggacgtgtggggcggaggcacagccgtgatagttagcagcgcatctgtggccgctcctagcgtgttcatcttcccacctagcgacgaggaactgaagtctggcacagccagcgtcgtgtgcctgctgaacaacttctaccccagagaagccaaggtgcagtggaaggtggacaacgccctgcagagcggcaatagccaagagagcgtgaccgagcaggacagcaaggactctacctacagcctgagcagcaccctgacactgagcaaggccgactacgagaagcacaaagtgtacgcctgcgaagtgacccaccagggcctttctagccctgtgaccaagagcttcaaccggggcgagtgcgataagacccacacctgtcctccatgtccagctccagaactgctggccggaccttccgtgttcctgtttcctccaaagcctaaggacaccctgatgatcagcagaacccctgaagtgacctgcgtggtggtggatgtgtctcacgaggaccctgaagtgaagttcaattggtacgtggacggcgtggaagtgcacaacgccaagaccaagcctagagaggaacagtacaacagcacctacagagtggtgtccgtgctgaccgtgctgcaccaggattggctgaacggcaaagagtacaagtgcaaggtgtccaacaaggccctgcctgcccctgaggaaaagaccatcagcaaggccaagggccagcctagggaaccccaggtttacaccctgcctccatgccgcgaggaaatgaccaagaaccaggtgtccctgtggtgcctggtcaagggcttctacccttccgatatcgccgtggaatgggagagcaatggccagcctgagaacaactacaagacaacccctcctgtgctggacagcgacggctcattcttcctgtacagcaagctgacagtggacaagagcagatggcagcagggcaacgtgttcagctgcagcgtgctgcatgaagccctgcacagccactacacccagaagtccctgtctctgagccccggcaagtgataaggatccgatctggtactgcatgcacgcaatgctagctgcccctttcccgtcctgggtaccccgagtctcccccgacctcgggtcccaggtatgctcccacctccacctgccccactcaccacctctgctagttccagacacctcccaagcacgcagcaatgcagctcaaaacgcttagcctagccacacccccacgggaaacagcagtgattaacctttagcaataaacgaaagtttaactaagctatactaaccccagggttggtcaatttcgtgccagccacaccctcgagctagcaaaaaaaaaaaaaaaaaaaaaaaaaaaaaagcatatgactaaaaaaaaaaaaaaaaaaaaaaaaaaaaaaaaaaaaaaaaaaaaaaaaaaaaaaaaaaaaaaaaaaaaaa

SEQ ID NO: 711 - RNA, 1919 nt, synthetic construct; identical to SEQ ID NO: 705
  source 1..1919: mol_type = other RNA

SEQ ID NO: 712 - RNA, 1919 nt, synthetic construct; identical to SEQ ID NO: 706
  source 1..1919: mol_type = other RNA

SEQ ID NO: 713 - RNA, 1919 nt, synthetic construct; identical to SEQ ID NO: 707
  source 1..1919: mol_type = other RNA

SEQ ID NO: 714 - RNA, 1919 nt, synthetic construct; identical to SEQ ID NO: 708
  source 1..1919: mol_type = other RNA

SEQ ID NO: 715 - RNA, 1919 nt, synthetic construct; identical to SEQ ID NO: 709
  source 1..1919: mol_type = other RNA

SEQ ID NO: 716 - RNA, 1919 nt, synthetic construct; identical to SEQ ID NO: 710
  source 1..1919: mol_type = other RNA

SEQ ID NO: 717 - RNA, 1919 nt, synthetic construct
  source 1..1919: mol_type = other RNA
agaataaactagtattcttctggtccccacagactcagagagaacccgccaccatggattggatttggagaatcctgttcctcgtgggcgccgctaccggagcccactcccagggcagactgtttcagtctggcgccgaagtgaaaagaccaggcgcctctgtgcggatcagctgcagagctgacgacgacccctacaccgacgacgataccttcaccaagtactggacccactggatcagacaggcccctggacaaagacctgagtggctgggagtgatcagccctcacttcgccagacctatctacagctacaagttccgggacagactgaccctgaccagagacagctctctgaccgccgtgtacctggaactgaagggcctgcagcctgacgacagcggcatctacttttgcgccagagatcccttcggcgacagagcccctcactacaactaccacatggacgtgtggggcggaggcacagccgtgatagttagcagcgcatctgtggccgctcctagcgtgttcatcttcccacctagcgacgaggaactgaagtctggcacagccagcgtcgtgtgcctgctgaacaacttctaccccagagaagccaaggtgcagtggaaggtggacaacgccctgcagagcggcaatagccaagagagcgtgaccgagcaggacagcaaggactctacctacagcctgagcagcaccctgacactgagcaaggccgactacgagaagcacaaagtgtacgcctgcgaagtgacccaccagggcctttctagccctgtgaccaagagcttcaaccggggcgagtgcgataagacccacacctgtcctccatgtccagctccagaactgctcggcggaccttccgtgttcctgtttcctccaaagcctaaggacaccctgatgatcagcagaacccctgaagtgacctgcgtggtggtggatgtgtctcacgaggacccagaagtgaagttcaattggtacgtggacggcgtggaagtgcacaacgccaagaccaagcctagagaggaacagtacaacagcacctacagagtggtgtccgtgctgacagtgctgcaccaggattggctgaacggcaaagagtacaagtgcaaggtgtccaacaaggccctgcctgctcctatcgagaaaaccatcagcaaggccaagggccagcctcgcgaacctcaagtctgtacactgcctcctagccgcgacgaactgaccaagaaccaggtgtccctgagctgcgccgtgaagggcttttacccttccgatatcgccgtggaatgggagagcaatggccagcctgagaacaactacaagacaacccctcctgtgctggacagcgacggctcattcttcctggtgtccaagctgacagtggacaagagcagatggcagcagggcaacgtgttcagctgcagcgtgctgcatgaagccctgcacagccactacacccagaagtccctgtctctgagccccggcaagtgataaggatccgatctggtactgcatgcacgcaatgctagctgcccctttcccgtcctgggtaccccgagtctcccccgacctcgggtcccaggtatgctcccacctccacctgccccactcaccacctctgctagttccagacacctcccaagcacgcagcaatgcagctcaaaacgcttagcctagccacacccccacgggaaacagcagtgattaacctttagcaataaacgaaagtttaactaagctatactaaccccagggttggtcaatttcgtgccagccacaccctcgagctagcaaaaaaaaaaaaaaaaaaaaaaaaaaaaaagcatatgactaaaaaaaaaaaaaaaaaaaaaaaaaaaaaaaaaaaaaaaaaaaaaaaaaaaaaaaaaaaaaaaaaaaaaa

SEQ ID NO: 718 - RNA, 1919 nt, synthetic construct
  source 1..1919: mol_type = other RNA
agaataaactagtattcttctggtccccacagactcagagagaacccgccaccatggattggatttggagaatcctgttcctcgtgggcgccgctaccggagcccactcccagggcagactgtttcagtctggcgccgaagtgaaaagaccaggcgcctctgtgcggatcagctgcagagctgacgacgacccctacaccgacgacgataccttcaccaagtactggacccactggatcagacaggcccctggacaaagacctgagtggctgggagtgatcagccctcacttcgccagacctatctacagctacaagttccgggacagactgaccctgaccagagacagctctctgaccgccgtgtacctggaactgaagggcctgcagcctgacgacagcggcatctacttttgcgccagagatcccttcggcgacagagcccctcactacaactaccacatggacgtgtggggcggaggcacagccgtgatagttagcagcgcatctgtggccgctcctagcgtgttcatcttcccacctagcgacgaggaactgaagtctggcacagccagcgtcgtgtgcctgctgaacaacttctaccccagagaagccaaggtgcagtggaaggtggacaacgccctgcagagcggcaatagccaagagagcgtgaccgagcaggacagcaaggactctacctacagcctgagcagcaccctgacactgagcaaggccgactacgagaagcacaaagtgtacgcctgcgaagtgacccaccagggcctttctagccctgtgaccaagagcttcaaccggggcgagtgcgataagacccacacctgtcctccatgtccagctccagaactgctggccggaccttccgtgttcctgtttcctccaaagcctaaggacaccctgatgatcagcagaacccctgaagtgacctgcgtggtggtggatgtgtctcacgaggaccctgaagtgaagttcaattggtacgtggacggcgtggaagtgcacaacgccaagaccaagcctagagaggaacagtacaacagcacctacagagtggtgtccgtgctgaccgtgctgcaccaggattggctgaacggcaaagagtacaagtgcaaggtgtccaacaaggccctgcctctgcctgaggaaaagaccatcagcaaggccaagggccagcctcgcgaacctcaagtctgtacactgcctcctagccgcgacgaactgaccaagaaccaggtgtccctgagctgcgccgtgaagggcttttacccttccgatatcgccgtggaatgggagagcaatggccagcctgagaacaactacaagacaacccctcctgtgctggacagcgacggctcattcttcctggtgtccaagctgacagtggacaagagcagatggcagcagggcaacgtgttcagctgcagcgtgctgcatgaagccctgcacagccactacacccagaagtccctgtctctgagccccggcaagtgataaggatccgatctggtactgcatgcacgcaatgctagctgcccctttcccgtcctgggtaccccgagtctcccccgacctcgggtcccaggtatgctcccacctccacctgccccactcaccacctctgctagttccagacacctcccaagcacgcagcaatgcagctcaaaacgcttagcctagccacacccccacgggaaacagcagtgattaacctttagcaataaacgaaagtttaactaagctatactaaccccagggttggtcaatttcgtgccagccacaccctcgagctagcaaaaaaaaaaaaaaaaaaaaaaaaaaaaaagcatatgactaaaaaaaaaaaaaaaaaaaaaaaaaaaaaaaaaaaaaaaaaaaaaaaaaaaaaaaaaaaaaaaaaaaaaa

SEQ ID NO: 719 - RNA, 1919 nt, synthetic construct
  source 1..1919: mol_type = other RNA
agaataaactagtattcttctggtccccacagactcagagagaacccgccaccatggattggatttggagaatcctgttcctcgtgggcgccgctaccggagcccactcccagggcagactgtttcagtctggcgccgaagtgaaaagaccaggcgcctctgtgcggatcagctgcagagctgacgacgacccctacaccgacgacgataccttcaccaagtactggacccactggatcagacaggcccctggacaaagacctgagtggctgggagtgatcagccctcacttcgccagacctatctacagctacaagttccgggacagactgaccctgaccagagacagctctctgaccgccgtgtacctggaactgaagggcctgcagcctgacgacagcggcatctacttttgcgccagagatcccttcggcgacagagcccctcactacaactaccacatggacgtgtggggcggaggcacagccgtgatagttagcagcgcatctgtggccgctcctagcgtgttcatcttcccacctagcgacgaggaactgaagtctggcacagccagcgtcgtgtgcctgctgaacaacttctaccccagagaagccaaggtgcagtggaaggtggacaacgccctgcagagcggcaatagccaagagagcgtgaccgagcaggacagcaaggactctacctacagcctgagcagcaccctgacactgagcaaggccgactacgagaagcacaaagtgtacgcctgcgaagtgacccaccagggcctttctagccctgtgaccaagagcttcaaccggggcgagtgcgataagacccacacctgtcctccatgtccagctccagaactgctggccggaccttccgtgttcctgtttcctccaaagcctaaggacaccctgatgatcagcagaacccctgaagtgacctgcgtggtggtggatgtgtctcacgaggaccctgaagtgaagttcaattggtacgtggacggcgtggaagtgcacaacgccaagaccaagcctagagaggaacagtacaacagcacctacagagtggtgtccgtgctgaccgtgctgcaccaggattggctgaacggcaaagagtacaagtgcaaggtgtccaacaaggccctgcctgcccctgaggaaaagaccatcagcaaggccaagggccagcctcgcgaacctcaagtctgtacactgcctcctagccgcgacgaactgaccaagaaccaggtgtccctgagctgcgccgtgaagggcttttacccttccgatatcgccgtggaatgggagagcaatggccagcctgagaacaactacaagacaacccctcctgtgctggacagcgacggctcattcttcctggtgtccaagctgacagtggacaagagcagatggcagcagggcaacgtgttcagctgcagcgtgctgcatgaagccctgcacagccactacacccagaagtccctgtctctgagccccggcaagtgataaggatccgatctggtactgcatgcacgcaatgctagctgcccctttcccgtcctgggtaccccgagtctcccccgacctcgggtcccaggtatgctcccacctccacctgccccactcaccacctctgctagttccagacacctcccaagcacgcagcaatgcagctcaaaacgcttagcctagccacacccccacgggaaacagcagtgattaacctttagcaataaacgaaagtttaactaagctatactaaccccagggttggtcaatttcgtgccagccacaccctcgagctagcaaaaaaaaaaaaaaaaaaaaaaaaaaaaaagcatatgactaaaaaaaaaaaaaaaaaaaaaaaaaaaaaaaaaaaaaaaaaaaaaaaaaaaaaaaaaaaaaaaaaaaaaa

SEQ ID NO: 720 - RNA, 1919 nt, synthetic construct
  source 1..1919: mol_type = other RNA
agaataaactagtattcttctggtccccacagactcagagagaacccgccaccatggattggatttggagaatcctgttcctcgtgggcgccgctaccggagcccactcccagggcagactgtttcagtctggcgccgaagtgaaaagaccaggcgcctctgtgcggatcagctgcagagctgacgacgacccctacaccgacgacgataccttcaccaagtactggacccactggatcagacaggcccctggacaaagacctgagtggctgggagtgatcagccctcacttcgccagacctatctacagctacaagttccgggacagactgaccctgaccagagacagctctctgaccgccgtgtacctggaactgaagggcctgcagcctgacgacagcggcatctacttttgcgccagagatcccttcggcgacagagcccctcactacaactaccacatggacgtgtggggcggaggcacagccgtgatagttagcagcgcatctgtggccgctcctagcgtgttcatcttcccacctagcgacgaggaactgaagtctggcacagccagcgtcgtgtgcctgctgaacaacttctaccccagagaagccaaggtgcagtggaaggtggacaacgccctgcagagcggcaatagccaagagagcgtgaccgagcaggacagcaaggactctacctacagcctgagcagcaccctgacactgagcaaggccgactacgagaagcacaaagtgtacgcctgcgaagtgacccaccagggcctttctagccctgtgaccaagagcttcaaccggggcgagtgcgataagacccacacctgtcctccatgtccagctccagaactgctcggcggaccttccgtgttcctgtttcctccaaagcctaaggacaccctgatgatcagcagaacccctgaagtgacctgcgtggtggtggatgtgtctcacgaggacccagaagtgaagttcaattggtacgtggacggcgtggaagtgcacaacgccaagaccaagcctagagaggaacagtacaacagcacctacagagtggtgtccgtgctgacagtgctgcaccaggattggctgaacggcaaagagtacaagtgcaaggtgtccaacaaggccctgcctgctcctatcgagaaaaccatcagcaaggccaagggccagcctagggaaccccaggtttacaccctgcctccatgccgcgacgaactgaccaagaaccaggtgtccctgtggtgcctggtcaagggcttctacccttccgatatcgccgtggaatgggagagcaatggccagcctgagaacaactacaagacaacccctcctgtgctggacagcgacggctcattcttcctgtacagcaagctgacagtggacaagagcagatggcagcagggcaacgtgttcagctgcagcgtgctgcatgaagccctgcacagccactacacccagaagtccctgtctctgagccccggcaagtgataaggatccgatctggtactgcatgcacgcaatgctagctgcccctttcccgtcctgggtaccccgagtctcccccgacctcgggtcccaggtatgctcccacctccacctgccccactcaccacctctgctagttccagacacctcccaagcacgcagcaatgcagctcaaaacgcttagcctagccacacccccacgggaaacagcagtgattaacctttagcaataaacgaaagtttaactaagctatactaaccccagggttggtcaatttcgtgccagccacaccctcgagctagcaaaaaaaaaaaaaaaaaaaaaaaaaaaaaagcatatgactaaaaaaaaaaaaaaaaaaaaaaaaaaaaaaaaaaaaaaaaaaaaaaaaaaaaaaaaaaaaaaaaaaaaaa

SEQ ID NO: 721 - RNA, 1919 nt, synthetic construct
  source 1..1919: mol_type = other RNA
agaataaactagtattcttctggtccccacagactcagagagaacccgccaccatggattggatttggagaatcctgttcctcgtgggcgccgctaccggagcccactcccagggcagactgtttcagtctggcgccgaagtgaaaagaccaggcgcctctgtgcggatcagctgcagagctgacgacgacccctacaccgacgacgataccttcaccaagtactggacccactggatcagacaggcccctggacaaagacctgagtggctgggagtgatcagccctcacttcgccagacctatctacagctacaagttccgggacagactgaccctgaccagagacagctctctgaccgccgtgtacctggaactgaagggcctgcagcctgacgacagcggcatctacttttgcgccagagatcccttcggcgacagagcccctcactacaactaccacatggacgtgtggggcggaggcacagccgtgatagttagcagcgcatctgtggccgctcctagcgtgttcatcttcccacctagcgacgaggaactgaagtctggcacagccagcgtcgtgtgcctgctgaacaacttctaccccagagaagccaaggtgcagtggaaggtggacaacgccctgcagagcggcaatagccaagagagcgtgaccgagcaggacagcaaggactctacctacagcctgagcagcaccctgacactgagcaaggccgactacgagaagcacaaagtgtacgcctgcgaagtgacccaccagggcctttctagccctgtgaccaagagcttcaaccggggcgagtgcgataagacccacacctgtcctccatgtccagctccagaactgctggccggaccttccgtgttcctgtttcctccaaagcctaaggacaccctgatgatcagcagaacccctgaagtgacctgcgtggtggtggatgtgtctcacgaggaccctgaagtgaagttcaattggtacgtggacggcgtggaagtgcacaacgccaagaccaagcctagagaggaacagtacaacagcacctacagagtggtgtccgtgctgaccgtgctgcaccaggattggctgaacggcaaagagtacaagtgcaaggtgtccaacaaggccctgcctctgcctgaggaaaagaccatcagcaaggccaagggccagcctagggaaccccaggtttacaccctgcctccatgccgcgacgaactgaccaagaaccaggtgtccctgtggtgcctggtcaagggcttctacccttccgatatcgccgtggaatgggagagcaatggccagcctgagaacaactacaagacaacccctcctgtgctggacagcgacggctcattcttcctgtacagcaagctgacagtggacaagagcagatggcagcagggcaacgtgttcagctgcagcgtgctgcatgaagccctgcacagccactacacccagaagtccctgtctctgagccccggcaagtgataaggatccgatctggtactgcatgcacgcaatgctagctgcccctttcccgtcctgggtaccccgagtctcccccgacctcgggtcccaggtatgctcccacctccacctgccccactcaccacctctgctagttccagacacctcccaagcacgcagcaatgcagctcaaaacgcttagcctagccacacccccacgggaaacagcagtgattaacctttagcaataaacgaaagtttaactaagctatactaaccccagggttggtcaatttcgtgccagccacaccctcgagctagcaaaaaaaaaaaaaaaaaaaaaaaaaaaaaagcatatgactaaaaaaaaaaaaaaaaaaaaaaaaaaaaaaaaaaaaaaaaaaaaaaaaaaaaaaaaaaaaaaaaaaaaaa

SEQ ID NO: 722 - RNA, 1919 nt, synthetic construct
  source 1..1919: mol_type = other RNA
agaataaactagtattcttctggtccccacagactcagagagaacccgccaccatggattggatttggagaatcctgttcctcgtgggcgccgctaccggagcccactcccagggcagactgtttcagtctggcgccgaagtgaaaagaccaggcgcctctgtgcggatcagctgcagagctgacgacgacccctacaccgacgacgataccttcaccaagtactggacccactggatcagacaggcccctggacaaagacctgagtggctgggagtgatcagccctcacttcgccagacctatctacagctacaagttccgggacagactgaccctgaccagagacagctctctgaccgccgtgtacctggaactgaagggcctgcagcctgacgacagcggcatctacttttgcgccagagatcccttcggcgacagagcccctcactacaactaccacatggacgtgtggggcggaggcacagccgtgatagttagcagcgcatctgtggccgctcctagcgtgttcatcttcccacctagcgacgaggaactgaagtctggcacagccagcgtcgtgtgcctgctgaacaacttctaccccagagaagccaaggtgcagtggaaggtggacaacgccctgcagagcggcaatagccaagagagcgtgaccgagcaggacagcaaggactctacctacagcctgagcagcaccctgacactgagcaaggccgactacgagaagcacaaagtgtacgcctgcgaagtgacccaccagggcctttctagccctgtgaccaagagcttcaaccggggcgagtgcgataagacccacacctgtcctccatgtccagctccagaactgctggccggaccttccgtgttcctgtttcctccaaagcctaaggacaccctgatgatcagcagaacccctgaagtgacctgcgtggtggtggatgtgtctcacgaggaccctgaagtgaagttcaattggtacgtggacggcgtggaagtgcacaacgccaagaccaagcctagagaggaacagtacaacagcacctacagagtggtgtccgtgctgaccgtgctgcaccaggattggctgaacggcaaagagtacaagtgcaaggtgtccaacaaggccctgcctgcccctgaggaaaagaccatcagcaaggccaagggccagcctagggaaccccaggtttacaccctgcctccatgccgcgacgaactgaccaagaaccaggtgtccctgtggtgcctggtcaagggcttctacccttccgatatcgccgtggaatgggagagcaatggccagcctgagaacaactacaagacaacccctcctgtgctggacagcgacggctcattcttcctgtacagcaagctgacagtggacaagagcagatggcagcagggcaacgtgttcagctgcagcgtgctgcatgaagccctgcacagccactacacccagaagtccctgtctctgagccccggcaagtgataaggatccgatctggtactgcatgcacgcaatgctagctgcccctttcccgtcctgggtaccccgagtctcccccgacctcgggtcccaggtatgctcccacctccacctgccccactcaccacctctgctagttccagacacctcccaagcacgcagcaatgcagctcaaaacgcttagcctagccacacccccacgggaaacagcagtgattaacctttagcaataaacgaaagtttaactaagctatactaaccccagggttggtcaatttcgtgccagccacaccctcgagctagcaaaaaaaaaaaaaaaaaaaaaaaaaaaaaagcatatgactaaaaaaaaaaaaaaaaaaaaaaaaaaaaaaaaaaaaaaaaaaaaaaaaaaaaaaaaaaaaaaaaaaaaaa

SEQ ID NO: 723 - RNA, 1163 nt, synthetic construct
  source 1..1163: mol_type = other RNA
agaataaactagtattcttctggtccccacagactcagagagaacccgccaccatggattggatttggagaatcctgttcctcgtgggcgccgctaccggagcccactccgaagttgtgctgacacagagccccgccatcctgagtgttagccctggcgatagagtgatcctgagctgcagagcctctcagggcctcgattcttctcacctggcctggtacagattcaagcggggacagatccccacactggtcatcttcggcaccagcaacagagccagaggcacccctgatagattttccggctctggcagcggagccgacttcaccctgacaatcagcagagtggaacccgaggacttcgccacctactactgccagagatacggcggcacccctatcacatttggcggcggaaccacactggacaagaaaagcagcgcctctacaaagggccccagcgttttcccactggctcctagcagcaagagcacatctggcggaacagccgctctgggctgtctggtcaaggactactttcccgagcctgtgaccgtgtcctggaattctggcgctctgacatccggcgtgcacacctttccagctgtgctgcaaagcagcggcctgtactctctgagcagcgtggtcacagtgccaagctctagcctgggcacccagacctacatctgcaatgtgaaccacaagcctagcaacacgaaggtcgacaagaaggtggaacccaagtcctgctgataaggatccgatctggtactgcatgcacgcaatgctagctgcccctttcccgtcctgggtaccccgagtctcccccgacctcgggtcccaggtatgctcccacctccacctgccccactcaccacctctgctagttccagacacctcccaagcacgcagcaatgcagctcaaaacgcttagcctagccacacccccacgggaaacagcagtgattaacctttagcaataaacgaaagtttaactaagctatactaaccccagggttggtcaatttcgtgccagccacaccctcgagctagcaaaaaaaaaaaaaaaaaaaaaaaaaaaaaagcatatgactaaaaaaaaaaaaaaaaaaaaaaaaaaaaaaaaaaaaaaaaaaaaaaaaaaaaaaaaaaaaaaaaaaaaaa

SEQ ID NO: 724 - RNA, 1907 nt, synthetic construct
  source 1..1907: mol_type = other RNA
agaataaactagtattcttctggtccccacagactcagagagaacccgccaccatggattggatttggagaatcctgttcctcgtgggcgccgctaccggagcccactcccagggcagactgtttcagtctggcgccgaagtgaaaagaccaggcgcctctgtgcggatcagctgcagagctgacgacgacccctacaccgacgacgataccttcaccaagtactggacccactggatcagacaggcccctggacaaagacctgagtggctgggagtgatcagccctcacttcgccagacctatctacagctacaagttccgggacagactgaccctgaccagagacagctctctgaccgccgtgtacctggaactgaagggcctgcagcctgacgacagcggcatctacttttgcgccagagatcccttcggcgacagagcccctcactacaactaccacatggacgtgtggggcggaggcacagccgtgatagttagcagcgcttccacaaagggccctagcgtgttccctctggctcctagcagcaagtctacaagcggaggaacagctgccctgggctgcctggtggaagattactttcctgagcctgtgaccgtgtcctggaacagcggtgctctgacttctggcgtgcacacctttccagccgtgctgcaaagcagcggcctgtactctctgagcagcgtggtcacagtgccaagctctagcctgggcacccagacctacatctgcaatgtgaaccacaagcctagcaacaccaaggtggacgacagagtggaacccaagagctgcgacaagacccacacctgtcctccatgtcctgctccagaactgctcggcggaccttccgtgttcctgtttcctccaaagcctaaggacaccctgatgatcagcagaacccctgaagtgacctgcgtggtggtggatgtgtctcacgaggacccagaagtgaagttcaattggtacgtggacggcgtggaagtgcacaacgccaagaccaagcctagagaggaacagtacaacagcacctacagagtggtgtccgtgctgacagtgctgcaccaggattggctgaacggcaaagagtacaagtgcaaggtgtccaacaaggccctgcctgctcctatcgagaaaaccatcagcaaggccaagggccagcctagggaaccccaggtttacacactgcctccaagccgcgaggaaatgaccaagaaccaggtgtccctgacctgcctcgtgaagggcttctacccttccgatatcgccgtggaatgggagagcaatggccagcctgagaacaactacaagacaacccctcctgtgctggacagcgacggctcattcttcctgtacagcaagctgactgtggataagtcccggtggcagcagggcaacgtgttcagctgttctgtgatgcacgaagccctgcacaaccactacacccagaaaagcctgtctctgagccccggcaagtgataaggatccgatctggtactgcatgcacgcaatgctagctgcccctttcccgtcctgggtaccccgagtctcccccgacctcgggtcccaggtatgctcccacctccacctgccccactcaccacctctgctagttccagacacctcccaagcacgcagcaatgcagctcaaaacgcttagcctagccacacccccacgggaaacagcagtgattaacctttagcaataaacgaaagtttaactaagctatactaaccccagggttggtcaatttcgtgccagccacaccctcgagctagcaaaaaaaaaaaaaaaaaaaaaaaaaaaaaagcatatgactaaaaaaaaaaaaaaaaaaaaaaaaaaaaaaaaaaaaaaaaaaaaaaaaaaaaaaaaaaaaaaaaaaaaaa

SEQ ID NO: 725 - RNA, 1907 nt, synthetic construct
  source 1..1907: mol_type = other RNA
agaataaactagtattcttctggtccccacagactcagagagaacccgccaccatggattggatttggagaatcctgttcctcgtgggcgccgctaccggagcccactcccagggcagactgtttcagtctggcgccgaagtgaaaagaccaggcgcctctgtgcggatcagctgcagagctgacgacgacccctacaccgacgacgataccttcaccaagtactggacccactggatcagacaggcccctggacaaagacctgagtggctgggagtgatcagccctcacttcgccagacctatctacagctacaagttccgggacagactgaccctgaccagagacagctctctgaccgccgtgtacctggaactgaagggcctgcagcctgacgacagcggcatctacttttgcgccagagatcccttcggcgacagagcccctcactacaactaccacatggacgtgtggggcggaggcacagccgtgatagttagcagcgcttccacaaagggccctagcgtgttccctctggctcctagcagcaagtctacaagcggaggaacagctgccctgggctgcctggtggaagattactttcctgagcctgtgaccgtgtcctggaacagcggtgctctgacttctggcgtgcacacctttccagccgtgctgcaaagcagcggcctgtactctctgagcagcgtggtcacagtgccaagctctagcctgggcacccagacctacatctgcaatgtgaaccacaagcctagcaacaccaaggtggacgacagagtggaacccaagagctgcgacaagacccacacctgtcctccatgtcctgctccagaactgctggccggaccttccgtgttcctgtttcctccaaagcctaaggacaccctgatgatcagcagaacccctgaagtgacctgcgtggtggtggatgtgtctcacgaggaccctgaagtgaagttcaattggtacgtggacggcgtggaagtgcacaacgccaagaccaagcctagagaggaacagtacaacagcacctacagagtggtgtccgtgctgaccgtgctgcaccaggattggctgaacggcaaagagtacaagtgcaaggtgtccaacaaggccctgcctgcccctgaggaaaagaccatcagcaaggccaagggccagcctagggaaccccaggtttacacactgcctccaagccgcgaggaaatgaccaagaaccaggtgtccctgacctgcctcgtgaagggcttctacccttccgatatcgccgtggaatgggagagcaatggccagcctgagaacaactacaagacaacccctcctgtgctggacagcgacggctcattcttcctgtacagcaagctgaccgtggacaagtccagatggcagcagggcaacgtgttcagctgtagcgtgctgcacgaagccctgcacagccactacacccagaaaagcctgtctctgagccccggcaaatgataaggatccgatctggtactgcatgcacgcaatgctagctgcccctttcccgtcctgggtaccccgagtctcccccgacctcgggtcccaggtatgctcccacctccacctgccccactcaccacctctgctagttccagacacctcccaagcacgcagcaatgcagctcaaaacgcttagcctagccacacccccacgggaaacagcagtgattaacctttagcaataaacgaaagtttaactaagctatactaaccccagggttggtcaatttcgtgccagccacaccctcgagctagcaaaaaaaaaaaaaaaaaaaaaaaaaaaaaagcatatgactaaaaaaaaaaaaaaaaaaaaaaaaaaaaaaaaaaaaaaaaaaaaaaaaaaaaaaaaaaaaaaaaaaaaaa

SEQ ID NO: 726 - RNA, 1907 nt, synthetic construct
  source 1..1907: mol_type = other RNA
agaataaactagtattcttctggtccccacagactcagagagaacccgccaccatggattggatttggagaatcctgttcctcgtgggcgccgctaccggagcccactcccagggcagactgtttcagtctggcgccgaagtgaaaagaccaggcgcctctgtgcggatcagctgcagagctgacgacgacccctacaccgacgacgataccttcaccaagtactggacccactggatcagacaggcccctggacaaagacctgagtggctgggagtgatcagccctcacttcgccagacctatctacagctacaagttccgggacagactgaccctgaccagagacagctctctgaccgccgtgtacctggaactgaagggcctgcagcctgacgacagcggcatctacttttgcgccagagatcccttcggcgacagagcccctcactacaactaccacatggacgtgtggggcggaggcacagccgtgatagttagcagcgcttccacaaagggccctagcgtgttccctctggctcctagcagcaagtctacaagcggaggaacagctgccctgggctgcctggtggaagattactttcctgagcctgtgaccgtgtcctggaacagcggtgctctgacttctggcgtgcacacctttccagccgtgctgcaaagcagcggcctgtactctctgagcagcgtggtcacagtgccaagctctagcctgggcacccagacctacatctgcaatgtgaaccacaagcctagcaacaccaaggtggacgacaaggtggaacccaagagctgcgacaagacccacacctgtcctccatgtcctgctccagaactgctcggcggaccttccgtgttcctgtttcctccaaagcctaaggacaccctgatgatcagcagaacccctgaagtgacctgcgtggtggtggatgtgtctcacgaggacccagaagtgaagttcaattggtacgtggacggcgtggaagtgcacaacgccaagaccaagcctagagaggaacagtacaacagcacctacagagtggtgtccgtgctgacagtgctgcaccaggattggctgaacggcaaagagtacaagtgcaaggtgtccaacaaggccctgcctgctcctatcgagaaaaccatcagcaaggccaagggccagcctagggaaccccaggtttacacactgcctccaagccgcgaggaaatgaccaagaaccaggtgtccctgacctgcctcgtgaagggcttctacccttccgatatcgccgtggaatgggagagcaatggccagcctgagaacaactacaagacaacccctcctgtgctggacagcgacggctcattcttcctgtacagcaagctgactgtggataagtcccggtggcagcagggcaacgtgttcagctgttctgtgatgcacgaagccctgcacaaccactacacccagaaaagcctgtctctgagccccggcaagtgataaggatccgatctggtactgcatgcacgcaatgctagctgcccctttcccgtcctgggtaccccgagtctcccccgacctcgggtcccaggtatgctcccacctccacctgccccactcaccacctctgctagttccagacacctcccaagcacgcagcaatgcagctcaaaacgcttagcctagccacacccccacgggaaacagcagtgattaacctttagcaataaacgaaagtttaactaagctatactaaccccagggttggtcaatttcgtgccagccacaccctcgagctagcaaaaaaaaaaaaaaaaaaaaaaaaaaaaaagcatatgactaaaaaaaaaaaaaaaaaaaaaaaaaaaaaaaaaaaaaaaaaaaaaaaaaaaaaaaaaaaaaaaaaaaaaa

SEQ ID NO: 727 - RNA, 1907 nt, synthetic construct
  source 1..1907: mol_type = other RNA
agaataaactagtattcttctggtccccacagactcagagagaacccgccaccatggattggatttggagaatcctgttcctcgtgggcgccgctaccggagcccactcccagggcagactgtttcagtctggcgccgaagtgaaaagaccaggcgcctctgtgcggatcagctgcagagctgacgacgacccctacaccgacgacgataccttcaccaagtactggacccactggatcagacaggcccctggacaaagacctgagtggctgggagtgatcagccctcacttcgccagacctatctacagctacaagttccgggacagactgaccctgaccagagacagctctctgaccgccgtgtacctggaactgaagggcctgcagcctgacgacagcggcatctacttttgcgccagagatcccttcggcgacagagcccctcactacaactaccacatggacgtgtggggcggaggcacagccgtgatagttagcagcgcttccacaaagggccctagcgtgttccctctggctcctagcagcaagtctacaagcggaggaacagctgccctgggctgcctggtggaagattactttcctgagcctgtgaccgtgtcctggaacagcggtgctctgacttctggcgtgcacacctttccagccgtgctgcaaagcagcggcctgtactctctgagcagcgtggtcacagtgccaagctctagcctgggcacccagacctacatctgcaatgtgaaccacaagcctagcaacaccaaggtggacgacaaggtggaacccaagagctgcgacaagacccacacctgtcctccatgtcctgctccagaactgctcggcggaccttccgtgttcctgtttcctccaaagcctaaggacaccctgatgatcagcagaacccctgaagtgacctgcgtggtggtggatgtgtctcacgaggacccagaagtgaagttcaattggtacgtggacggcgtggaagtgcacaacgccaagaccaagcctagagaggaacagtacaacagcacctacagagtggtgtccgtgctgacagtgctgcaccaggattggctgaacggcaaagagtacaagtgcaaggtgtccaacaaggccctgcctgctcctatcgagaaaaccatcagcaaggccaagggccagcctagggaaccccaggtttacacactgcctccaagccgcgaggaaatgaccaagaaccaggtgtccctgacctgcctcgtgaagggcttctacccttccgatatcgccgtggaatgggagagcaatggccagcctgagaacaactacaagacaacccctcctgtgctggacagcgacggctcattcttcctgtacagcaagctgaccgtggacaagtccagatggcagcagggcaacgtgttcagctgtagcgtgctgcacgaagccctgcacagccactacacccagaaaagcctgtctctgagccccggcaaatgataaggatccgatctggtactgcatgcacgcaatgctagctgcccctttcccgtcctgggtaccccgagtctcccccgacctcgggtcccaggtatgctcccacctccacctgccccactcaccacctctgctagttccagacacctcccaagcacgcagcaatgcagctcaaaacgcttagcctagccacacccccacgggaaacagcagtgattaacctttagcaataaacgaaagtttaactaagctatactaaccccagggttggtcaatttcgtgccagccacaccctcgagctagcaaaaaaaaaaaaaaaaaaaaaaaaaaaaaagcatatgactaaaaaaaaaaaaaaaaaaaaaaaaaaaaaaaaaaaaaaaaaaaaaaaaaaaaaaaaaaaaaaaaaaaaaa

SEQ ID NO: 728 - RNA, 1907 nt, synthetic construct
  source 1..1907: mol_type = other RNA
agaataaactagtattcttctggtccccacagactcagagagaacccgccaccatggattggatttggagaatcctgttcctcgtgggcgccgctaccggagcccactcccagggcagactgtttcagtctggcgccgaagtgaaaagaccaggcgcctctgtgcggatcagctgcagagctgacgacgacccctacaccgacgacgataccttcaccaagtactggacccactggatcagacaggcccctggacaaagacctgagtggctgggagtgatcagccctcacttcgccagacctatctacagctacaagttccgggacagactgaccctgaccagagacagctctctgaccgccgtgtacctggaactgaagggcctgcagcctgacgacagcggcatctacttttgcgccagagatcccttcggcgacagagcccctcactacaactaccacatggacgtgtggggcggaggcacagccgtgatagttagcagcgcttccacaaagggccctagcgtgttccctctggctcctagcagcaagtctacaagcggaggaacagctgccctgggctgcctggtggaagattactttcctgagcctgtgaccgtgtcctggaacagcggtgctctgacttctggcgtgcacacctttccagccgtgctgcaaagcagcggcctgtactctctgagcagcgtggtcacagtgccaagctctagcctgggcacccagacctacatctgcaatgtgaaccacaagcctagcaacaccaaggtggacgacaaggtggaacccaagagctgcgacaagacccacacctgtcctccatgtcctgctccagaactgctggccggaccttccgtgttcctgtttcctccaaagcctaaggacaccctgatgatcagcagaacccctgaagtgacctgcgtggtggtggatgtgtctcacgaggaccctgaagtgaagttcaattggtacgtggacggcgtggaagtgcacaacgccaagaccaagcctagagaggaacagtacaacagcacctacagagtggtgtccgtgctgaccgtgctgcaccaggattggctgaacggcaaagagtacaagtgcaaggtgtccaacaaggccctgcctctgcctgaggaaaagaccatcagcaaggccaagggccagcctagggaaccccaggtttacacactgcctccaagccgcgaggaaatgaccaagaaccaggtgtccctgacctgcctcgtgaagggcttctacccttccgatatcgccgtggaatgggagagcaatggccagcctgagaacaactacaagacaacccctcctgtgctggacagcgacggctcattcttcctgtacagcaagctgaccgtggacaagtccagatggcagcagggcaacgtgttcagctgtagcgtgctgcacgaagccctgcacagccactacacccagaaaagcctgtctctgagccccggcaaatgataaggatccgatctggtactgcatgcacgcaatgctagctgcccctttcccgtcctgggtaccccgagtctcccccgacctcgggtcccaggtatgctcccacctccacctgccccactcaccacctctgctagttccagacacctcccaagcacgcagcaatgcagctcaaaacgcttagcctagccacacccccacgggaaacagcagtgattaacctttagcaataaacgaaagtttaactaagctatactaaccccagggttggtcaatttcgtgccagccacaccctcgagctagcaaaaaaaaaaaaaaaaaaaaaaaaaaaaaagcatatgactaaaaaaaaaaaaaaaaaaaaaaaaaaaaaaaaaaaaaaaaaaaaaaaaaaaaaaaaaaaaaaaaaaaaaa

SEQ ID NO: 729 - RNA, 1907 nt, synthetic construct
  source 1..1907: mol_type = other RNA
agaataaactagtattcttctggtccccacagactcagagagaacccgccaccatggattggatttggagaatcctgttcctcgtgggcgccgctaccggagcccactcccagggcagactgtttcagtctggcgccgaagtgaaaagaccaggcgcctctgtgcggatcagctgcagagctgacgacgacccctacaccgacgacgataccttcaccaagtactggacccactggatcagacaggcccctggacaaagacctgagtggctgggagtgatcagccctcacttcgccagacctatctacagctacaagttccgggacagactgaccctgaccagagacagctctctgaccgccgtgtacctggaactgaagggcctgcagcctgacgacagcggcatctacttttgcgccagagatcccttcggcgacagagcccctcactacaactaccacatggacgtgtggggcggaggcacagccgtgatagttagcagcgcttccacaaagggccctagcgtgttccctctggctcctagcagcaagtctacaagcggaggaacagctgccctgggctgcctggtggaagattactttcctgagcctgtgaccgtgtcctggaacagcggtgctctgacttctggcgtgcacacctttccagccgtgctgcaaagcagcggcctgtactctctgagcagcgtggtcacagtgccaagctctagcctgggcacccagacctacatctgcaatgtgaaccacaagcctagcaacaccaaggtggacgacaaggtggaacccaagagctgcgacaagacccacacctgtcctccatgtcctgctccagaactgctggccggaccttccgtgttcctgtttcctccaaagcctaaggacaccctgatgatcagcagaacccctgaagtgacctgcgtggtggtggatgtgtctcacgaggaccctgaagtgaagttcaattggtacgtggacggcgtggaagtgcacaacgccaagaccaagcctagagaggaacagtacaacagcacctacagagtggtgtccgtgctgaccgtgctgcaccaggattggctgaacggcaaagagtacaagtgcaaggtgtccaacaaggccctgcctgcccctgaggaaaagaccatcagcaaggccaagggccagcctagggaaccccaggtttacacactgcctccaagccgcgaggaaatgaccaagaaccaggtgtccctgacctgcctcgtgaagggcttctacccttccgatatcgccgtggaatgggagagcaatggccagcctgagaacaactacaagacaacccctcctgtgctggacagcgacggctcattcttcctgtacagcaagctgaccgtggacaagtccagatggcagcagggcaacgtgttcagctgtagcgtgctgcacgaagccctgcacagccactacacccagaaaagcctgtctctgagccccggcaaatgataaggatccgatctggtactgcatgcacgcaatgctagctgcccctttcccgtcctgggtaccccgagtctcccccgacctcgggtcccaggtatgctcccacctccacctgccccactcaccacctctgctagttccagacacctcccaagcacgcagcaatgcagctcaaaacgcttagcctagccacacccccacgggaaacagcagtgattaacctttagcaataaacgaaagtttaactaagctatactaaccccagggttggtcaatttcgtgccagccacaccctcgagctagcaaaaaaaaaaaaaaaaaaaaaaaaaaaaaagcatatgactaaaaaaaaaaaaaaaaaaaaaaaaaaaaaaaaaaaaaaaaaaaaaaaaaaaaaaaaaaaaaaaaaaaaaa

SEQ ID NO: 730 - RNA, 1907 nt, synthetic construct
  source 1..1907: mol_type = other RNA
agaataaactagtattcttctggtccccacagactcagagagaacccgccaccatggattggatttggagaatcctgttcctcgtgggcgccgctaccggagcccactcccagggcagactgtttcagtctggcgccgaagtgaaaagaccaggcgcctctgtgcggatcagctgcagagctgacgacgacccctacaccgacgacgataccttcaccaagtactggacccactggatcagacaggcccctggacaaagacctgagtggctgggagtgatcagccctcacttcgccagacctatctacagctacaagttccgggacagactgaccctgaccagagacagctctctgaccgccgtgtacctggaactgaagggcctgcagcctgacgacagcggcatctacttttgcgccagagatcccttcggcgacagagcccctcactacaactaccacatggacgtgtggggcggaggcacagccgtgatagttagcagcgcttccacaaagggccctagcgtgttccctctggctcctagcagcaagtctacaagcggaggaacagctgccctgggctgcctggtggaagattactttcctgagcctgtgaccgtgtcctggaacagcggtgctctgacttctggcgtgcacacctttccagccgtgctgcaaagcagcggcctgtactctctgagcagcgtggtcacagtgccaagctctagcctgggcacccagacctacatctgcaatgtgaaccacaagcctagcaacaccaaggtggacgacaaggtggaacccaagagctgcgacaagacccacacctgtcctccatgtcctgctccagaactgctcggcggaccttccgtgttcctgtttcctccaaagcctaaggacaccctgatgatcagcagaacccctgaagtgacctgcgtggtggtggatgtgtctcacgaggacccagaagtgaagttcaattggtacgtggacggcgtggaagtgcacaacgccaagaccaagcctagagaggaacagtacaacagcacctacagagtggtgtccgtgctgacagtgctgcaccaggattggctgaacggcaaagagtacaagtgcaaggtgtccaacaaggccctgcctgctcctatcgagaaaaccatcagcaaggccaagggccagcctagggaaccccaggtttacacactgcctccaagccgcgacgaactgaccaagaaccaggtgtccctgacctgcctcgtgaagggcttctacccttccgatatcgccgtggaatgggagagcaatggccagcctgagaacaactacaagacaacccctcctgtgctggacagcgacggctcattcttcctgtacagcaagctgactgtggataagtcccggtggcagcagggcaacgtgttcagctgttctgtgatgcacgaagccctgcacaaccactacacccagaaaagcctgtctctgagccccggcaagtgataaggatccgatctggtactgcatgcacgcaatgctagctgcccctttcccgtcctgggtaccccgagtctcccccgacctcgggtcccaggtatgctcccacctccacctgccccactcaccacctctgctagttccagacacctcccaagcacgcagcaatgcagctcaaaacgcttagcctagccacacccccacgggaaacagcagtgattaacctttagcaataaacgaaagtttaactaagctatactaaccccagggttggtcaatttcgtgccagccacaccctcgagctagcaaaaaaaaaaaaaaaaaaaaaaaaaaaaaagcatatgactaaaaaaaaaaaaaaaaaaaaaaaaaaaaaaaaaaaaaaaaaaaaaaaaaaaaaaaaaaaaaaaaaaaaaa

SEQ ID NO: 731 - RNA, 1907 nt, synthetic construct
  source 1..1907: mol_type = other RNA
agaataaactagtattcttctggtccccacagactcagagagaacccgccaccatggattggatttggagaatcctgttcctcgtgggcgccgctaccggagcccactcccagggcagactgtttcagtctggcgccgaagtgaaaagaccaggcgcctctgtgcggatcagctgcagagctgacgacgacccctacaccgacgacgataccttcaccaagtactggacccactggatcagacaggcccctggacaaagacctgagtggctgggagtgatcagccctcacttcgccagacctatctacagctacaagttccgggacagactgaccctgaccagagacagctctctgaccgccgtgtacctggaactgaagggcctgcagcctgacgacagcggcatctacttttgcgccagagatcccttcggcgacagagcccctcactacaactaccacatggacgtgtggggcggaggcacagccgtgatagttagcagcgcttccacaaagggccctagcgtgttccctctggctcctagcagcaagtctacaagcggaggaacagctgccctgggctgcctggtggaagattactttcctgagcctgtgaccgtgtcctggaacagcggtgctctgacttctggcgtgcacacctttccagccgtgctgcaaagcagcggcctgtactctctgagcagcgtggtcacagtgccaagctctagcctgggcacccagacctacatctgcaatgtgaaccacaagcctagcaacaccaaggtggacgacaaggtggaacccaagagctgcgacaagacccacacctgtcctccatgtcctgctccagaactgctcggcggaccttccgtgttcctgtttcctccaaagcctaaggacaccctgatgatcagcagaacccctgaagtgacctgcgtggtggtggatgtgtctcacgaggacccagaagtgaagttcaattggtacgtggacggcgtggaagtgcacaacgccaagaccaagcctagagaggaacagtacaacagcacctacagagtggtgtccgtgctgacagtgctgcaccaggattggctgaacggcaaagagtacaagtgcaaggtgtccaacaaggccctgcctgctcctatcgagaaaaccatcagcaaggccaagggccagcctagggaaccccaggtttacacactgcctccaagccgcgacgaactgaccaagaaccaggtgtccctgacctgcctcgtgaagggcttctacccttccgatatcgccgtggaatgggagagcaatggccagcctgagaacaactacaagacaacccctcctgtgctggacagcgacggctcattcttcctgtacagcaagctgaccgtggacaagtccagatggcagcagggcaacgtgttcagctgtagcgtgctgcacgaagccctgcacagccactacacccagaaaagcctgtctctgagccccggcaaatgataaggatccgatctggtactgcatgcacgcaatgctagctgcccctttcccgtcctgggtaccccgagtctcccccgacctcgggtcccaggtatgctcccacctccacctgccccactcaccacctctgctagttccagacacctcccaagcacgcagcaatgcagctcaaaacgcttagcctagccacacccccacgggaaacagcagtgattaacctttagcaataaacgaaagtttaactaagctatactaaccccagggttggtcaatttcgtgccagccacaccctcgagctagcaaaaaaaaaaaaaaaaaaaaaaaaaaaaaagcatatgactaaaaaaaaaaaaaaaaaaaaaaaaaaaaaaaaaaaaaaaaaaaaaaaaaaaaaaaaaaaaaaaaaaaaaa

SEQ ID NO: 732 - RNA, 1907 nt, synthetic construct
  source 1..1907: mol_type = other RNA
agaataaactagtattcttctggtccccacagactcagagagaacccgccaccatggattggatttggagaatcctgttcctcgtgggcgccgctaccggagcccactcccagggcagactgtttcagtctggcgccgaagtgaaaagaccaggcgcctctgtgcggatcagctgcagagctgacgacgacccctacaccgacgacgataccttcaccaagtactggacccactggatcagacaggcccctggacaaagacctgagtggctgggagtgatcagccctcacttcgccagacctatctacagctacaagttccgggacagactgaccctgaccagagacagctctctgaccgccgtgtacctggaactgaagggcctgcagcctgacgacagcggcatctacttttgcgccagagatcccttcggcgacagagcccctcactacaactaccacatggacgtgtggggcggaggcacagccgtgatagttagcagcgcttccacaaagggccctagcgtgttccctctggctcctagcagcaagtctacaagcggaggaacagctgccctgggctgcctggtggaagattactttcctgagcctgtgaccgtgtcctggaacagcggtgctctgacttctggcgtgcacacctttccagccgtgctgcaaagcagcggcctgtactctctgagcagcgtggtcacagtgccaagctctagcctgggcacccagacctacatctgcaatgtgaaccacaagcctagcaacaccaaggtggacgacaaggtggaacccaagagctgcgacaagacccacacctgtcctccatgtcctgctccagaactgctggccggaccttccgtgttcctgtttcctccaaagcctaaggacaccctgatgatcagcagaacccctgaagtgacctgcgtggtggtggatgtgtctcacgaggaccctgaagtgaagttcaattggtacgtggacggcgtggaagtgcacaacgccaagaccaagcctagagaggaacagtacaacagcacctacagagtggtgtccgtgctgaccgtgctgcaccaggattggctgaacggcaaagagtacaagtgcaaggtgtccaacaaggccctgcctctgcctgaggaaaagaccatcagcaaggccaagggccagcctagggaaccccaggtttacacactgcctccaagccgcgacgaactgaccaagaaccaggtgtccctgacctgcctcgtgaagggcttctacccttccgatatcgccgtggaatgggagagcaatggccagcctgagaacaactacaagacaacccctcctgtgctggacagcgacggctcattcttcctgtacagcaagctgaccgtggacaagtccagatggcagcagggcaacgtgttcagctgtagcgtgctgcacgaagccctgcacagccactacacccagaaaagcctgtctctgagccccggcaaatgataaggatccgatctggtactgcatgcacgcaatgctagctgcccctttcccgtcctgggtaccccgagtctcccccgacctcgggtcccaggtatgctcccacctccacctgccccactcaccacctctgctagttccagacacctcccaagcacgcagcaatgcagctcaaaacgcttagcctagccacacccccacgggaaacagcagtgattaacctttagcaataaacgaaagtttaactaagctatactaaccccagggttggtcaatttcgtgccagccacaccctcgagctagcaaaaaaaaaaaaaaaaaaaaaaaaaaaaaagcatatgactaaaaaaaaaaaaaaaaaaaaaaaaaaaaaaaaaaaaaaaaaaaaaaaaaaaaaaaaaaaaaaaaaaaaaa

SEQ ID NO: 733 - RNA, 1907 nt, synthetic construct
  source 1..1907: mol_type = other RNA
agaataaactagtattcttctggtccccacagactcagagagaacccgccaccatggattggatttggagaatcctgttcctcgtgggcgccgctaccggagcccactcccagggcagactgtttcagtctggcgccgaagtgaaaagaccaggcgcctctgtgcggatcagctgcagagctgacgacgacccctacaccgacgacgataccttcaccaagtactggacccactggatcagacaggcccctggacaaagacctgagtggctgggagtgatcagccctcacttcgccagacctatctacagctacaagttccgggacagactgaccctgaccagagacagctctctgaccgccgtgtacctggaactgaagggcctgcagcctgacgacagcggcatctacttttgcgccagagatcccttcggcgacagagcccctcactacaactaccacatggacgtgtggggcggaggcacagccgtgatagttagcagcgcttccacaaagggccctagcgtgttccctctggctcctagcagcaagtctacaagcggaggaacagctgccctgggctgcctggtggaagattactttcctgagcctgtgaccgtgtcctggaacagcggtgctctgacttctggcgtgcacacctttccagccgtgctgcaaagcagcggcctgtactctctgagcagcgtggtcacagtgccaagctctagcctgggcacccagacctacatctgcaatgtgaaccacaagcctagcaacaccaaggtggacgacaaggtggaacccaagagctgcgacaagacccacacctgtcctccatgtcctgctccagaactgctggccggaccttccgtgttcctgtttcctccaaagcctaaggacaccctgatgatcagcagaacccctgaagtgacctgcgtggtggtggatgtgtctcacgaggaccctgaagtgaagttcaattggtacgtggacggcgtggaagtgcacaacgccaagaccaagcctagagaggaacagtacaacagcacctacagagtggtgtccgtgctgaccgtgctgcaccaggattggctgaacggcaaagagtacaagtgcaaggtgtccaacaaggccctgcctgcccctgaggaaaagaccatcagcaaggccaagggccagcctagggaaccccaggtttacacactgcctccaagccgcgacgaactgaccaagaaccaggtgtccctgacctgcctcgtgaagggcttctacccttccgatatcgccgtggaatgggagagcaatggccagcctgagaacaactacaagacaacccctcctgtgctggacagcgacggctcattcttcctgtacagcaagctgaccgtggacaagtccagatggcagcagggcaacgtgttcagctgtagcgtgctgcacgaagccctgcacagccactacacccagaaaagcctgtctctgagccccggcaaatgataaggatccgatctggtactgcatgcacgcaatgctagctgcccctttcccgtcctgggtaccccgagtctcccccgacctcgggtcccaggtatgctcccacctccacctgccccactcaccacctctgctagttccagacacctcccaagcacgcagcaatgcagctcaaaacgcttagcctagccacacccccacgggaaacagcagtgattaacctttagcaataaacgaaagtttaactaagctatactaaccccagggttggtcaatttcgtgccagccacaccctcgagctagcaaaaaaaaaaaaaaaaaaaaaaaaaaaaaagcatatgactaaaaaaaaaaaaaaaaaaaaaaaaaaaaaaaaaaaaaaaaaaaaaaaaaaaaaaaaaaaaaaaaaaaaaa

SEQ ID NO: 734 - RNA, 1907 nt, synthetic construct
  source 1..1907: mol_type = other RNA
agaataaactagtattcttctggtccccacagactcagagagaacccgccaccatggattggatttggagaatcctgttcctcgtgggcgccgctaccggagcccactcccagggcagactgtttcagtctggcgccgaagtgaaaagaccaggcgcctctgtgcggatcagctgcagagctgacgacgacccctacaccgacgacgataccttcaccaagtactggacccactggatcagacaggcccctggacaaagacctgagtggctgggagtgatcagccctcacttcgccagacctatctacagctacaagttccgggacagactgaccctgaccagagacagctctctgaccgccgtgtacctggaactgaagggcctgcagcctgacgacagcggcatctacttttgcgccagagatcccttcggcgacagagcccctcactacaactaccacatggacgtgtggggcggaggcacagccgtgatagttagcagcgcttccacaaagggccctagcgtgttccctctggctcctagcagcaagtctacaagcggaggaacagctgccctgggctgcctggtggaagattactttcctgagcctgtgaccgtgtcctggaacagcggtgctctgacttctggcgtgcacacctttccagccgtgctgcaaagcagcggcctgtactctctgagcagcgtggtcacagtgccaagctctagcctgggcacccagacctacatctgcaatgtgaaccacaagcctagcaacaccaaggtggacgacagagtggaacccaagagctgcgacaagacccacacctgtcctccatgtcctgctccagaactgctggccggaccttccgtgttcctgtttcctccaaagcctaaggacaccctgatgatcagcagaacccctgaagtgacctgcgtggtggtggatgtgtctcacgaggaccctgaagtgaagttcaattggtacgtggacggcgtggaagtgcacaacgccaagaccaagcctagagaggaacagtacaacagcacctacagagtggtgtccgtgctgaccgtgctgcaccaggattggctgaacggcaaagagtacaagtgcaaggtgtccaacaaggccctgcctgcccctgaggaaaagaccatcagcaaggccaagggccagcctcgcgaacctcaagtctgtacactgcctcctagccgcgaggaaatgaccaagaaccaggtgtccctgagctgcgccgtgaagggcttttacccttccgatatcgccgtggaatgggagagcaatggccagcctgagaacaactacaagacaacccctcctgtgctggacagcgacggctcattcttcctggtgtccaagctgacagtggacaagagcagatggcagcagggcaacgtgttcagctgcagcgtgctgcatgaagccctgcacagccactacacccagaagtccctgtctctgagccccggcaagtgataaggatccgatctggtactgcatgcacgcaatgctagctgcccctttcccgtcctgggtaccccgagtctcccccgacctcgggtcccaggtatgctcccacctccacctgccccactcaccacctctgctagttccagacacctcccaagcacgcagcaatgcagctcaaaacgcttagcctagccacacccccacgggaaacagcagtgattaacctttagcaataaacgaaagtttaactaagctatactaaccccagggttggtcaatttcgtgccagccacaccctcgagctagcaaaaaaaaaaaaaaaaaaaaaaaaaaaaaagcatatgactaaaaaaaaaaaaaaaaaaaaaaaaaaaaaaaaaaaaaaaaaaaaaaaaaaaaaaaaaaaaaaaaaaaaaa

SEQ ID NO: 735 - RNA, 1907 nt, synthetic construct
  source 1..1907: mol_type = other RNA
agaataaactagtattcttctggtccccacagactcagagagaacccgccaccatggattggatttggagaatcctgttcctcgtgggcgccgctaccggagcccactcccagggcagactgtttcagtctggcgccgaagtgaaaagaccaggcgcctctgtgcggatcagctgcagagctgacgacgacccctacaccgacgacgataccttcaccaagtactggacccactggatcagacaggcccctggacaaagacctgagtggctgggagtgatcagccctcacttcgccagacctatctacagctacaagttccgggacagactgaccctgaccagagacagctctctgaccgccgtgtacctggaactgaagggcctgcagcctgacgacagcggcatctacttttgcgccagagatcccttcggcgacagagcccctcactacaactaccacatggacgtgtggggcggaggcacagccgtgatagttagcagcgcttccacaaagggccctagcgtgttccctctggctcctagcagcaagtctacaagcggaggaacagctgccctgggctgcctggtggaagattactttcctgagcctgtgaccgtgtcctggaacagcggtgctctgacttctggcgtgcacacctttccagccgtgctgcaaagcagcggcctgtactctctgagcagcgtggtcacagtgccaagctctagcctgggcacccagacctacatctgcaatgtgaaccacaagcctagcaacaccaaggtggacgacagagtggaacccaagagctgcgacaagacccacacctgtcctccatgtcctgctccagaactgctggccggaccttccgtgttcctgtttcctccaaagcctaaggacaccctgatgatcagcagaacccctgaagtgacctgcgtggtggtggatgtgtctcacgaggaccctgaagtgaagttcaattggtacgtggacggcgtggaagtgcacaacgccaagaccaagcctagagaggaacagtacaacagcacctacagagtggtgtccgtgctgaccgtgctgcaccaggattggctgaacggcaaagagtacaagtgcaaggtgtccaacaaggccctgcctgcccctgaggaaaagaccatcagcaaggccaagggccagcctagggaaccccaggtttacaccctgcctccatgccgcgaggaaatgaccaagaaccaggtgtccctgtggtgcctggtcaagggcttctacccttccgatatcgccgtggaatgggagagcaatggccagcctgagaacaactacaagacaacccctcctgtgctggacagcgacggctcattcttcctgtacagcaagctgacagtggacaagagcagatggcagcagggcaacgtgttcagctgcagcgtgctgcatgaagccctgcacagccactacacccagaagtccctgtctctgagccccggcaagtgataaggatccgatctggtactgcatgcacgcaatgctagctgcccctttcccgtcctgggtaccccgagtctcccccgacctcgggtcccaggtatgctcccacctccacctgccccactcaccacctctgctagttccagacacctcccaagcacgcagcaatgcagctcaaaacgcttagcctagccacacccccacgggaaacagcagtgattaacctttagcaataaacgaaagtttaactaagctatactaaccccagggttggtcaatttcgtgccagccacaccctcgagctagcaaaaaaaaaaaaaaaaaaaaaaaaaaaaaagcatatgactaaaaaaaaaaaaaaaaaaaaaaaaaaaaaaaaaaaaaaaaaaaaaaaaaaaaaaaaaaaaaaaaaaaaaa

SEQ ID NO: 736 - RNA, 1907 nt, synthetic construct
  source 1..1907: mol_type = other RNA
agaataaactagtattcttctggtccccacagactcagagagaacccgccaccatggattggatttggagaatcctgttcctcgtgggcgccgctaccggagcccactcccagggcagactgtttcagtctggcgccgaagtgaaaagaccaggcgcctctgtgcggatcagctgcagagctgacgacgacccctacaccgacgacgataccttcaccaagtactggacccactggatcagacaggcccctggacaaagacctgagtggctgggagtgatcagccctcacttcgccagacctatctacagctacaagttccgggacagactgaccctgaccagagacagctctctgaccgccgtgtacctggaactgaagggcctgcagcctgacgacagcggcatctacttttgcgccagagatcccttcggcgacagagcccctcactacaactaccacatggacgtgtggggcggaggcacagccgtgatagttagcagcgcttccacaaagggccctagcgtgttccctctggctcctagcagcaagtctacaagcggaggaacagctgccctgggctgcctggtggaagattactttcctgagcctgtgaccgtgtcctggaacagcggtgctctgacttctggcgtgcacacctttccagccgtgctgcaaagcagcggcctgtactctctgagcagcgtggtcacagtgccaagctctagcctgggcacccagacctacatctgcaatgtgaaccacaagcctagcaacaccaaggtggacgacaaggtggaacccaagagctgcgacaagacccacacctgtcctccatgtcctgctccagaactgctcggcggaccttccgtgttcctgtttcctccaaagcctaaggacaccctgatgatcagcagaacccctgaagtgacctgcgtggtggtggatgtgtctcacgaggacccagaagtgaagttcaattggtacgtggacggcgtggaagtgcacaacgccaagaccaagcctagagaggaacagtacaacagcacctacagagtggtgtccgtgctgacagtgctgcaccaggattggctgaacggcaaagagtacaagtgcaaggtgtccaacaaggccctgcctgctcctatcgagaaaaccatcagcaaggccaagggccagcctcgcgaacctcaagtctgtacactgcctcctagccgcgaggaaatgaccaagaaccaggtgtccctgagctgcgccgtgaagggcttttacccttccgatatcgccgtggaatgggagagcaatggccagcctgagaacaactacaagacaacccctcctgtgctggacagcgacggctcattcttcctggtgtccaagctgacagtggacaagagcagatggcagcagggcaacgtgttcagctgcagcgtgctgcatgaagccctgcacagccactacacccagaagtccctgtctctgagccccggcaagtgataaggatccgatctggtactgcatgcacgcaatgctagctgcccctttcccgtcctgggtaccccgagtctcccccgacctcgggtcccaggtatgctcccacctccacctgccccactcaccacctctgctagttccagacacctcccaagcacgcagcaatgcagctcaaaacgcttagcctagccacacccccacgggaaacagcagtgattaacctttagcaataaacgaaagtttaactaagctatactaaccccagggttggtcaatttcgtgccagccacaccctcgagctagcaaaaaaaaaaaaaaaaaaaaaaaaaaaaaagcatatgactaaaaaaaaaaaaaaaaaaaaaaaaaaaaaaaaaaaaaaaaaaaaaaaaaaaaaaaaaaaaaaaaaaaaaa

SEQ ID NO: 737 - RNA, 1907 nt, synthetic construct
  source 1..1907: mol_type = other RNA
agaataaactagtattcttctggtccccacagactcagagagaacccgccaccatggattggatttggagaatcctgttcctcgtgggcgccgctaccggagcccactcccagggcagactgtttcagtctggcgccgaagtgaaaagaccaggcgcctctgtgcggatcagctgcagagctgacgacgacccctacaccgacgacgataccttcaccaagtactggacccactggatcagacaggcccctggacaaagacctgagtggctgggagtgatcagccctcacttcgccagacctatctacagctacaagttccgggacagactgaccctgaccagagacagctctctgaccgccgtgtacctggaactgaagggcctgcagcctgacgacagcggcatctacttttgcgccagagatcccttcggcgacagagcccctcactacaactaccacatggacgtgtggggcggaggcacagccgtgatagttagcagcgcttccacaaagggccctagcgtgttccctctggctcctagcagcaagtctacaagcggaggaacagctgccctgggctgcctggtggaagattactttcctgagcctgtgaccgtgtcctggaacagcggtgctctgacttctggcgtgcacacctttccagccgtgctgcaaagcagcggcctgtactctctgagcagcgtggtcacagtgccaagctctagcctgggcacccagacctacatctgcaatgtgaaccacaagcctagcaacaccaaggtggacgacaaggtggaacccaagagctgcgacaagacccacacctgtcctccatgtcctgctccagaactgctggccggaccttccgtgttcctgtttcctccaaagcctaaggacaccctgatgatcagcagaacccctgaagtgacctgcgtggtggtggatgtgtctcacgaggaccctgaagtgaagttcaattggtacgtggacggcgtggaagtgcacaacgccaagaccaagcctagagaggaacagtacaacagcacctacagagtggtgtccgtgctgaccgtgctgcaccaggattggctgaacggcaaagagtacaagtgcaaggtgtccaacaaggccctgcctctgcctgaggaaaagaccatcagcaaggccaagggccagcctcgcgaacctcaagtctgtacactgcctcctagccgcgaggaaatgaccaagaaccaggtgtccctgagctgcgccgtgaagggcttttacccttccgatatcgccgtggaatgggagagcaatggccagcctgagaacaactacaagacaacccctcctgtgctggacagcgacggctcattcttcctggtgtccaagctgacagtggacaagagcagatggcagcagggcaacgtgttcagctgcagcgtgctgcatgaagccctgcacagccactacacccagaagtccctgtctctgagccccggcaagtgataaggatccgatctggtactgcatgcacgcaatgctagctgcccctttcccgtcctgggtaccccgagtctcccccgacctcgggtcccaggtatgctcccacctccacctgccccactcaccacctctgctagttccagacacctcccaagcacgcagcaatgcagctcaaaacgcttagcctagccacacccccacgggaaacagcagtgattaacctttagcaataaacgaaagtttaactaagctatactaaccccagggttggtcaatttcgtgccagccacaccctcgagctagcaaaaaaaaaaaaaaaaaaaaaaaaaaaaaagcatatgactaaaaaaaaaaaaaaaaaaaaaaaaaaaaaaaaaaaaaaaaaaaaaaaaaaaaaaaaaaaaaaaaaaaaaa

SEQ ID NO: 738 - RNA, 1907 nt, synthetic construct
  source 1..1907: mol_type = other RNA
agaataaactagtattcttctggtccccacagactcagagagaacccgccaccatggattggatttggagaatcctgttcctcgtgggcgccgctaccggagcccactcccagggcagactgtttcagtctggcgccgaagtgaaaagaccaggcgcctctgtgcggatcagctgcagagctgacgacgacccctacaccgacgacgataccttcaccaagtactggacccactggatcagacaggcccctggacaaagacctgagtggctgggagtgatcagccctcacttcgccagacctatctacagctacaagttccgggacagactgaccctgaccagagacagctctctgaccgccgtgtacctggaactgaagggcctgcagcctgacgacagcggcatctacttttgcgccagagatcccttcggcgacagagcccctcactacaactaccacatggacgtgtggggcggaggcacagccgtgatagttagcagcgcttccacaaagggccctagcgtgttccctctggctcctagcagcaagtctacaagcggaggaacagctgccctgggctgcctggtggaagattactttcctgagcctgtgaccgtgtcctggaacagcggtgctctgacttctggcgtgcacacctttccagccgtgctgcaaagcagcggcctgtactctctgagcagcgtggtcacagtgccaagctctagcctgggcacccagacctacatctgcaatgtgaaccacaagcctagcaacaccaaggtggacgacaaggtggaacccaagagctgcgacaagacccacacctgtcctccatgtcctgctccagaactgctggccggaccttccgtgttcctgtttcctccaaagcctaaggacaccctgatgatcagcagaacccctgaagtgacctgcgtggtggtggatgtgtctcacgaggaccctgaagtgaagttcaattggtacgtggacggcgtggaagtgcacaacgccaagaccaagcctagagaggaacagtacaacagcacctacagagtggtgtccgtgctgaccgtgctgcaccaggattggctgaacggcaaagagtacaagtgcaaggtgtccaacaaggccctgcctgcccctgaggaaaagaccatcagcaaggccaagggccagcctcgcgaacctcaagtctgtacactgcctcctagccgcgaggaaatgaccaagaaccaggtgtccctgagctgcgccgtgaagggcttttacccttccgatatcgccgtggaatgggagagcaatggccagcctgagaacaactacaagacaacccctcctgtgctggacagcgacggctcattcttcctggtgtccaagctgacagtggacaagagcagatggcagcagggcaacgtgttcagctgcagcgtgctgcatgaagccctgcacagccactacacccagaagtccctgtctctgagccccggcaagtgataaggatccgatctggtactgcatgcacgcaatgctagctgcccctttcccgtcctgggtaccccgagtctcccccgacctcgggtcccaggtatgctcccacctccacctgccccactcaccacctctgctagttccagacacctcccaagcacgcagcaatgcagctcaaaacgcttagcctagccacacccccacgggaaacagcagtgattaacctttagcaataaacgaaagtttaactaagctatactaaccccagggttggtcaatttcgtgccagccacaccctcgagctagcaaaaaaaaaaaaaaaaaaaaaaaaaaaaaagcatatgactaaaaaaaaaaaaaaaaaaaaaaaaaaaaaaaaaaaaaaaaaaaaaaaaaaaaaaaaaaaaaaaaaaaaaa

SEQ ID NO: 739 - RNA, 1907 nt, synthetic construct
  source 1..1907: mol_type = other RNA
agaataaactagtattcttctggtccccacagactcagagagaacccgccaccatggattggatttggagaatcctgttcctcgtgggcgccgctaccggagcccactcccagggcagactgtttcagtctggcgccgaagtgaaaagaccaggcgcctctgtgcggatcagctgcagagctgacgacgacccctacaccgacgacgataccttcaccaagtactggacccactggatcagacaggcccctggacaaagacctgagtggctgggagtgatcagccctcacttcgccagacctatctacagctacaagttccgggacagactgaccctgaccagagacagctctctgaccgccgtgtacctggaactgaagggcctgcagcctgacgacagcggcatctacttttgcgccagagatcccttcggcgacagagcccctcactacaactaccacatggacgtgtggggcggaggcacagccgtgatagttagcagcgcttccacaaagggccctagcgtgttccctctggctcctagcagcaagtctacaagcggaggaacagctgccctgggctgcctggtggaagattactttcctgagcctgtgaccgtgtcctggaacagcggtgctctgacttctggcgtgcacacctttccagccgtgctgcaaagcagcggcctgtactctctgagcagcgtggtcacagtgccaagctctagcctgggcacccagacctacatctgcaatgtgaaccacaagcctagcaacaccaaggtggacgacaaggtggaacccaagagctgcgacaagacccacacctgtcctccatgtcctgctccagaactgctcggcggaccttccgtgttcctgtttcctccaaagcctaaggacaccctgatgatcagcagaacccctgaagtgacctgcgtggtggtggatgtgtctcacgaggacccagaagtgaagttcaattggtacgtggacggcgtggaagtgcacaacgccaagaccaagcctagagaggaacagtacaacagcacctacagagtggtgtccgtgctgacagtgctgcaccaggattggctgaacggcaaagagtacaagtgcaaggtgtccaacaaggccctgcctgctcctatcgagaaaaccatcagcaaggccaagggccagcctagggaaccccaggtttacaccctgcctccatgccgcgaggaaatgaccaagaaccaggtgtccctgtggtgcctggtcaagggcttctacccttccgatatcgccgtggaatgggagagcaatggccagcctgagaacaactacaagacaacccctcctgtgctggacagcgacggctcattcttcctgtacagcaagctgacagtggacaagagcagatggcagcagggcaacgtgttcagctgcagcgtgctgcatgaagccctgcacagccactacacccagaagtccctgtctctgagccccggcaagtgataaggatccgatctggtactgcatgcacgcaatgctagctgcccctttcccgtcctgggtaccccgagtctcccccgacctcgggtcccaggtatgctcccacctccacctgccccactcaccacctctgctagttccagacacctcccaagcacgcagcaatgcagctcaaaacgcttagcctagccacacccccacgggaaacagcagtgattaacctttagcaataaacgaaagtttaactaagctatactaaccccagggttggtcaatttcgtgccagccacaccctcgagctagcaaaaaaaaaaaaaaaaaaaaaaaaaaaaaagcatatgactaaaaaaaaaaaaaaaaaaaaaaaaaaaaaaaaaaaaaaaaaaaaaaaaaaaaaaaaaaaaaaaaaaaaaa

SEQ ID NO: 740 - RNA, 1907 nt, synthetic construct
  source 1..1907: mol_type = other RNA
agaataaactagtattcttctggtccccacagactcagagagaacccgccaccatggattggatttggagaatcctgttcctcgtgggcgccgctaccggagcccactcccagggcagactgtttcagtctggcgccgaagtgaaaagaccaggcgcctctgtgcggatcagctgcagagctgacgacgacccctacaccgacgacgataccttcaccaagtactggacccactggatcagacaggcccctggacaaagacctgagtggctgggagtgatcagccctcacttcgccagacctatctacagctacaagttccgggacagactgaccctgaccagagacagctctctgaccgccgtgtacctggaactgaagggcctgcagcctgacgacagcggcatctacttttgcgccagagatcccttcggcgacagagcccctcactacaactaccacatggacgtgtggggcggaggcacagccgtgatagttagcagcgcttccacaaagggccctagcgtgttccctctggctcctagcagcaagtctacaagcggaggaacagctgccctgggctgcctggtggaagattactttcctgagcctgtgaccgtgtcctggaacagcggtgctctgacttctggcgtgcacacctttccagccgtgctgcaaagcagcggcctgtactctctgagcagcgtggtcacagtgccaagctctagcctgggcacccagacctacatctgcaatgtgaaccacaagcctagcaacaccaaggtggacgacaaggtggaacccaagagctgcgacaagacccacacctgtcctccatgtcctgctccagaactgctggccggaccttccgtgttcctgtttcctccaaagcctaaggacaccctgatgatcagcagaacccctgaagtgacctgcgtggtggtggatgtgtctcacgaggaccctgaagtgaagttcaattggtacgtggacggcgtggaagtgcacaacgccaagaccaagcctagagaggaacagtacaacagcacctacagagtggtgtccgtgctgaccgtgctgcaccaggattggctgaacggcaaagagtacaagtgcaaggtgtccaacaaggccctgcctctgcctgaggaaaagaccatcagcaaggccaagggccagcctagggaaccccaggtttacaccctgcctccatgccgcgaggaaatgaccaagaaccaggtgtccctgtggtgcctggtcaagggcttctacccttccgatatcgccgtggaatgggagagcaatggccagcctgagaacaactacaagacaacccctcctgtgctggacagcgacggctcattcttcctgtacagcaagctgacagtggacaagagcagatggcagcagggcaacgtgttcagctgcagcgtgctgcatgaagccctgcacagccactacacccagaagtccctgtctctgagccccggcaagtgataaggatccgatctggtactgcatgcacgcaatgctagctgcccctttcccgtcctgggtaccccgagtctcccccgacctcgggtcccaggtatgctcccacctccacctgccccactcaccacctctgctagttccagacacctcccaagcacgcagcaatgcagctcaaaacgcttagcctagccacacccccacgggaaacagcagtgattaacctttagcaataaacgaaagtttaactaagctatactaaccccagggttggtcaatttcgtgccagccacaccctcgagctagcaaaaaaaaaaaaaaaaaaaaaaaaaaaaaagcatatgactaaaaaaaaaaaaaaaaaaaaaaaaaaaaaaaaaaaaaaaaaaaaaaaaaaaaaaaaaaaaaaaaaaaaaa

SEQ ID NO: 741 - RNA, 1907 nt, synthetic construct
  source 1..1907: mol_type = other RNA
agaataaactagtattcttctggtccccacagactcagagagaacccgccaccatggattggatttggagaatcctgttcctcgtgggcgccgctaccggagcccactcccagggcagactgtttcagtctggcgccgaagtgaaaagaccaggcgcctctgtgcggatcagctgcagagctgacgacgacccctacaccgacgacgataccttcaccaagtactggacccactggatcagacaggcccctggacaaagacctgagtggctgggagtgatcagccctcacttcgccagacctatctacagctacaagttccgggacagactgaccctgaccagagacagctctctgaccgccgtgtacctggaactgaagggcctgcagcctgacgacagcggcatctacttttgcgccagagatcccttcggcgacagagcccctcactacaactaccacatggacgtgtggggcggaggcacagccgtgatagttagcagcgcttccacaaagggccctagcgtgttccctctggctcctagcagcaagtctacaagcggaggaacagctgccctgggctgcctggtggaagattactttcctgagcctgtgaccgtgtcctggaacagcggtgctctgacttctggcgtgcacacctttccagccgtgctgcaaagcagcggcctgtactctctgagcagcgtggtcacagtgccaagctctagcctgggcacccagacctacatctgcaatgtgaaccacaagcctagcaacaccaaggtggacgacaaggtggaacccaagagctgcgacaagacccacacctgtcctccatgtcctgctccagaactgctggccggaccttccgtgttcctgtttcctccaaagcctaaggacaccctgatgatcagcagaacccctgaagtgacctgcgtggtggtggatgtgtctcacgaggaccctgaagtgaagttcaattggtacgtggacggcgtggaagtgcacaacgccaagaccaagcctagagaggaacagtacaacagcacctacagagtggtgtccgtgctgaccgtgctgcaccaggattggctgaacggcaaagagtacaagtgcaaggtgtccaacaaggccctgcctgcccctgaggaaaagaccatcagcaaggccaagggccagcctagggaaccccaggtttacaccctgcctccatgccgcgaggaaatgaccaagaaccaggtgtccctgtggtgcctggtcaagggcttctacccttccgatatcgccgtggaatgggagagcaatggccagcctgagaacaactacaagacaacccctcctgtgctggacagcgacggctcattcttcctgtacagcaagctgacagtggacaagagcagatggcagcagggcaacgtgttcagctgcagcgtgctgcatgaagccctgcacagccactacacccagaagtccctgtctctgagccccggcaagtgataaggatccgatctggtactgcatgcacgcaatgctagctgcccctttcccgtcctgggtaccccgagtctcccccgacctcgggtcccaggtatgctcccacctccacctgccccactcaccacctctgctagttccagacacctcccaagcacgcagcaatgcagctcaaaacgcttagcctagccacacccccacgggaaacagcagtgattaacctttagcaataaacgaaagtttaactaagctatactaaccccagggttggtcaatttcgtgccagccacaccctcgagctagcaaaaaaaaaaaaaaaaaaaaaaaaaaaaaagcatatgactaaaaaaaaaaaaaaaaaaaaaaaaaaaaaaaaaaaaaaaaaaaaaaaaaaaaaaaaaaaaaaaaaaaaaa

SEQ ID NO: 742 - RNA, 1907 nt, synthetic construct
  source 1..1907: mol_type = other RNA
agaataaactagtattcttctggtccccacagactcagagagaacccgccaccatggattggatttggagaatcctgttcctcgtgggcgccgctaccggagcccactcccagggcagactgtttcagtctggcgccgaagtgaaaagaccaggcgcctctgtgcggatcagctgcagagctgacgacgacccctacaccgacgacgataccttcaccaagtactggacccactggatcagacaggcccctggacaaagacctgagtggctgggagtgatcagccctcacttcgccagacctatctacagctacaagttccgggacagactgaccctgaccagagacagctctctgaccgccgtgtacctggaactgaagggcctgcagcctgacgacagcggcatctacttttgcgccagagatcccttcggcgacagagcccctcactacaactaccacatggacgtgtggggcggaggcacagccgtgatagttagcagcgcttccacaaagggccctagcgtgttccctctggctcctagcagcaagtctacaagcggaggaacagctgccctgggctgcctggtggaagattactttcctgagcctgtgaccgtgtcctggaacagcggtgctctgacttctggcgtgcacacctttccagccgtgctgcaaagcagcggcctgtactctctgagcagcgtggtcacagtgccaagctctagcctgggcacccagacctacatctgcaatgtgaaccacaagcctagcaacaccaaggtggacgacaaggtggaacccaagagctgcgacaagacccacacctgtcctccatgtcctgctccagaactgctcggcggaccttccgtgttcctgtttcctccaaagcctaaggacaccctgatgatcagcagaacccctgaagtgacctgcgtggtggtggatgtgtctcacgaggacccagaagtgaagttcaattggtacgtggacggcgtggaagtgcacaacgccaagaccaagcctagagaggaacagtacaacagcacctacagagtggtgtccgtgctgacagtgctgcaccaggattggctgaacggcaaagagtacaagtgcaaggtgtccaacaaggccctgcctgctcctatcgagaaaaccatcagcaaggccaagggccagcctcgcgaacctcaagtctgtacactgcctcctagccgcgacgaactgaccaagaaccaggtgtccctgagctgcgccgtgaagggcttttacccttccgatatcgccgtggaatgggagagcaatggccagcctgagaacaactacaagacaacccctcctgtgctggacagcgacggctcattcttcctggtgtccaagctgacagtggacaagagcagatggcagcagggcaacgtgttcagctgcagcgtgctgcatgaagccctgcacagccactacacccagaagtccctgtctctgagccccggcaagtgataaggatccgatctggtactgcatgcacgcaatgctagctgcccctttcccgtcctgggtaccccgagtctcccccgacctcgggtcccaggtatgctcccacctccacctgccccactcaccacctctgctagttccagacacctcccaagcacgcagcaatgcagctcaaaacgcttagcctagccacacccccacgggaaacagcagtgattaacctttagcaataaacgaaagtttaactaagctatactaaccccagggttggtcaatttcgtgccagccacaccctcgagctagcaaaaaaaaaaaaaaaaaaaaaaaaaaaaaagcatatgactaaaaaaaaaaaaaaaaaaaaaaaaaaaaaaaaaaaaaaaaaaaaaaaaaaaaaaaaaaaaaaaaaaaaaa

SEQ ID NO: 743 - RNA, 1907 nt, synthetic construct
  source 1..1907: mol_type = other RNA
agaataaactagtattcttctggtccccacagactcagagagaacccgccaccatggattggatttggagaatcctgttcctcgtgggcgccgctaccggagcccactcccagggcagactgtttcagtctggcgccgaagtgaaaagaccaggcgcctctgtgcggatcagctgcagagctgacgacgacccctacaccgacgacgataccttcaccaagtactggacccactggatcagacaggcccctggacaaagacctgagtggctgggagtgatcagccctcacttcgccagacctatctacagctacaagttccgggacagactgaccctgaccagagacagctctctgaccgccgtgtacctggaactgaagggcctgcagcctgacgacagcggcatctacttttgcgccagagatcccttcggcgacagagcccctcactacaactaccacatggacgtgtggggcggaggcacagccgtgatagttagcagcgcttccacaaagggccctagcgtgttccctctggctcctagcagcaagtctacaagcggaggaacagctgccctgggctgcctggtggaagattactttcctgagcctgtgaccgtgtcctggaacagcggtgctctgacttctggcgtgcacacctttccagccgtgctgcaaagcagcggcctgtactctctgagcagcgtggtcacagtgccaagctctagcctgggcacccagacctacatctgcaatgtgaaccacaagcctagcaacaccaaggtggacgacaaggtggaacccaagagctgcgacaagacccacacctgtcctccatgtcctgctccagaactgctggccggaccttccgtgttcctgtttcctccaaagcctaaggacaccctgatgatcagcagaacccctgaagtgacctgcgtggtggtggatgtgtctcacgaggaccctgaagtgaagttcaattggtacgtggacggcgtggaagtgcacaacgccaagaccaagcctagagaggaacagtacaacagcacctacagagtggtgtccgtgctgaccgtgctgcaccaggattggctgaacggcaaagagtacaagtgcaaggtgtccaacaaggccctgcctctgcctgaggaaaagaccatcagcaaggccaagggccagcctcgcgaacctcaagtctgtacactgcctcctagccgcgacgaactgaccaagaaccaggtgtccctgagctgcgccgtgaagggcttttacccttccgatatcgccgtggaatgggagagcaatggccagcctgagaacaactacaagacaacccctcctgtgctggacagcgacggctcattcttcctggtgtccaagctgacagtggacaagagcagatggcagcagggcaacgtgttcagctgcagcgtgctgcatgaagccctgcacagccactacacccagaagtccctgtctctgagccccggcaagtgataaggatccgatctggtactgcatgcacgcaatgctagctgcccctttcccgtcctgggtaccccgagtctcccccgacctcgggtcccaggtatgctcccacctccacctgccccactcaccacctctgctagttccagacacctcccaagcacgcagcaatgcagctcaaaacgcttagcctagccacacccccacgggaaacagcagtgattaacctttagcaataaacgaaagtttaactaagctatactaaccccagggttggtcaatttcgtgccagccacaccctcgagctagcaaaaaaaaaaaaaaaaaaaaaaaaaaaaaagcatatgactaaaaaaaaaaaaaaaaaaaaaaaaaaaaaaaaaaaaaaaaaaaaaaaaaaaaaaaaaaaaaaaaaaaaaa

SEQ ID NO: 744 - RNA, 1907 nt, synthetic construct
  source 1..1907: mol_type = other RNA
agaataaactagtattcttctggtccccacagactcagagagaacccgccaccatggattggatttggagaatcctgttcctcgtgggcgccgctaccggagcccactcccagggcagactgtttcagtctggcgccgaagtgaaaagaccaggcgcctctgtgcggatcagctgcagagctgacgacgacccctacaccgacgacgataccttcaccaagtactggacccactggatcagacaggcccctggacaaagacctgagtggctgggagtgatcagccctcacttcgccagacctatctacagctacaagttccgggacagactgaccctgaccagagacagctctctgaccgccgtgtacctggaactgaagggcctgcagcctgacgacagcggcatctacttttgcgccagagatcccttcggcgacagagcccctcactacaactaccacatggacgtgtggggcggaggcacagccgtgatagttagcagcgcttccacaaagggccctagcgtgttccctctggctcctagcagcaagtctacaagcggaggaacagctgccctgggctgcctggtggaagattactttcctgagcctgtgaccgtgtcctggaacagcggtgctctgacttctggcgtgcacacctttccagccgtgctgcaaagcagcggcctgtactctctgagcagcgtggtcacagtgccaagctctagcctgggcacccagacctacatctgcaatgtgaaccacaagcctagcaacaccaaggtggacgacaaggtggaacccaagagctgcgacaagacccacacctgtcctccatgtcctgctccagaactgctggccggaccttccgtgttcctgtttcctccaaagcctaaggacaccctgatgatcagcagaacccctgaagtgacctgcgtggtggtggatgtgtctcacgaggaccctgaagtgaagttcaattggtacgtggacggcgtggaagtgcacaacgccaagaccaagcctagagaggaacagtacaacagcacctacagagtggtgtccgtgctgaccgtgctgcaccaggattggctgaacggcaaagagtacaagtgcaaggtgtccaacaaggccctgcctgcccctgaggaaaagaccatcagcaaggccaagggccagcctcgcgaacctcaagtctgtacactgcctcctagccgcgacgaactgaccaagaaccaggtgtccctgagctgcgccgtgaagggcttttacccttccgatatcgccgtggaatgggagagcaatggccagcctgagaacaactacaagacaacccctcctgtgctggacagcgacggctcattcttcctggtgtccaagctgacagtggacaagagcagatggcagcagggcaacgtgttcagctgcagcgtgctgcatgaagccctgcacagccactacacccagaagtccctgtctctgagccccggcaagtgataaggatccgatctggtactgcatgcacgcaatgctagctgcccctttcccgtcctgggtaccccgagtctcccccgacctcgggtcccaggtatgctcccacctccacctgccccactcaccacctctgctagttccagacacctcccaagcacgcagcaatgcagctcaaaacgcttagcctagccacacccccacgggaaacagcagtgattaacctttagcaataaacgaaagtttaactaagctatactaaccccagggttggtcaatttcgtgccagccacaccctcgagctagcaaaaaaaaaaaaaaaaaaaaaaaaaaaaaagcatatgactaaaaaaaaaaaaaaaaaaaaaaaaaaaaaaaaaaaaaaaaaaaaaaaaaaaaaaaaaaaaaaaaaaaaaa

SEQ ID NO: 745 - RNA, 1907 nt, synthetic construct
  source 1..1907: mol_type = other RNA
agaataaactagtattcttctggtccccacagactcagagagaacccgccaccatggattggatttggagaatcctgttcctcgtgggcgccgctaccggagcccactcccagggcagactgtttcagtctggcgccgaagtgaaaagaccaggcgcctctgtgcggatcagctgcagagctgacgacgacccctacaccgacgacgataccttcaccaagtactggacccactggatcagacaggcccctggacaaagacctgagtggctgggagtgatcagccctcacttcgccagacctatctacagctacaagttccgggacagactgaccctgaccagagacagctctctgaccgccgtgtacctggaactgaagggcctgcagcctgacgacagcggcatctacttttgcgccagagatcccttcggcgacagagcccctcactacaactaccacatggacgtgtggggcggaggcacagccgtgatagttagcagcgcttccacaaagggccctagcgtgttccctctggctcctagcagcaagtctacaagcggaggaacagctgccctgggctgcctggtggaagattactttcctgagcctgtgaccgtgtcctggaacagcggtgctctgacttctggcgtgcacacctttccagccgtgctgcaaagcagcggcctgtactctctgagcagcgtggtcacagtgccaagctctagcctgggcacccagacctacatctgcaatgtgaaccacaagcctagcaacaccaaggtggacgacaaggtggaacccaagagctgcgacaagacccacacctgtcctccatgtcctgctccagaactgctcggcggaccttccgtgttcctgtttcctccaaagcctaaggacaccctgatgatcagcagaacccctgaagtgacctgcgtggtggtggatgtgtctcacgaggacccagaagtgaagttcaattggtacgtggacggcgtggaagtgcacaacgccaagaccaagcctagagaggaacagtacaacagcacctacagagtggtgtccgtgctgacagtgctgcaccaggattggctgaacggcaaagagtacaagtgcaaggtgtccaacaaggccctgcctgctcctatcgagaaaaccatcagcaaggccaagggccagcctagggaaccccaggtttacaccctgcctccatgccgcgacgaactgaccaagaaccaggtgtccctgtggtgcctggtcaagggcttctacccttccgatatcgccgtggaatgggagagcaatggccagcctgagaacaactacaagacaacccctcctgtgctggacagcgacggctcattcttcctgtacagcaagctgacagtggacaagagcagatggcagcagggcaacgtgttcagctgcagcgtgctgcatgaagccctgcacagccactacacccagaagtccctgtctctgagccccggcaagtgataaggatccgatctggtactgcatgcacgcaatgctagctgcccctttcccgtcctgggtaccccgagtctcccccgacctcgggtcccaggtatgctcccacctccacctgccccactcaccacctctgctagttccagacacctcccaagcacgcagcaatgcagctcaaaacgcttagcctagccacacccccacgggaaacagcagtgattaacctttagcaataaacgaaagtttaactaagctatactaaccccagggttggtcaatttcgtgccagccacaccctcgagctagcaaaaaaaaaaaaaaaaaaaaaaaaaaaaaagcatatgactaaaaaaaaaaaaaaaaaaaaaaaaaaaaaaaaaaaaaaaaaaaaaaaaaaaaaaaaaaaaaaaaaaaaaa

SEQ ID NO: 746 - RNA, 1907 nt, synthetic construct
  source 1..1907: mol_type = other RNA
agaataaactagtattcttctggtccccacagactcagagagaacccgccaccatggattggatttggagaatcctgttcctcgtgggcgccgctaccggagcccactcccagggcagactgtttcagtctggcgccgaagtgaaaagaccaggcgcctctgtgcggatcagctgcagagctgacgacgacccctacaccgacgacgataccttcaccaagtactggacccactggatcagacaggcccctggacaaagacctgagtggctgggagtgatcagccctcacttcgccagacctatctacagctacaagttccgggacagactgaccctgaccagagacagctctctgaccgccgtgtacctggaactgaagggcctgcagcctgacgacagcggcatctacttttgcgccagagatcccttcggcgacagagcccctcactacaactaccacatggacgtgtggggcggaggcacagccgtgatagttagcagcgcttccacaaagggccctagcgtgttccctctggctcctagcagcaagtctacaagcggaggaacagctgccctgggctgcctggtggaagattactttcctgagcctgtgaccgtgtcctggaacagcggtgctctgacttctggcgtgcacacctttccagccgtgctgcaaagcagcggcctgtactctctgagcagcgtggtcacagtgccaagctctagcctgggcacccagacctacatctgcaatgtgaaccacaagcctagcaacaccaaggtggacgacaaggtggaacccaagagctgcgacaagacccacacctgtcctccatgtcctgctccagaactgctggccggaccttccgtgttcctgtttcctccaaagcctaaggacaccctgatgatcagcagaacccctgaagtgacctgcgtggtggtggatgtgtctcacgaggaccctgaagtgaagttcaattggtacgtggacggcgtggaagtgcacaacgccaagaccaagcctagagaggaacagtacaacagcacctacagagtggtgtccgtgctgaccgtgctgcaccaggattggctgaacggcaaagagtacaagtgcaaggtgtccaacaaggccctgcctctgcctgaggaaaagaccatcagcaaggccaagggccagcctagggaaccccaggtttacaccctgcctccatgccgcgacgaactgaccaagaaccaggtgtccctgtggtgcctggtcaagggcttctacccttccgatatcgccgtggaatgggagagcaatggccagcctgagaacaactacaagacaacccctcctgtgctggacagcgacggctcattcttcctgtacagcaagctgacagtggacaagagcagatggcagcagggcaacgtgttcagctgcagcgtgctgcatgaagccctgcacagccactacacccagaagtccctgtctctgagccccggcaagtgataaggatccgatctggtactgcatgcacgcaatgctagctgcccctttcccgtcctgggtaccccgagtctcccccgacctcgggtcccaggtatgctcccacctccacctgccccactcaccacctctgctagttccagacacctcccaagcacgcagcaatgcagctcaaaacgcttagcctagccacacccccacgggaaacagcagtgattaacctttagcaataaacgaaagtttaactaagctatactaaccccagggttggtcaatttcgtgccagccacaccctcgagctagcaaaaaaaaaaaaaaaaaaaaaaaaaaaaaagcatatgactaaaaaaaaaaaaaaaaaaaaaaaaaaaaaaaaaaaaaaaaaaaaaaaaaaaaaaaaaaaaaaaaaaaaaa

SEQ ID NO: 747 - RNA, 1907 nt, synthetic construct
  source 1..1907: mol_type = other RNA
agaataaactagtattcttctggtccccacagactcagagagaacccgccaccatggattggatttggagaatcctgttcctcgtgggcgccgctaccggagcccactcccagggcagactgtttcagtctggcgccgaagtgaaaagaccaggcgcctctgtgcggatcagctgcagagctgacgacgacccctacaccgacgacgataccttcaccaagtactggacccactggatcagacaggcccctggacaaagacctgagtggctgggagtgatcagccctcacttcgccagacctatctacagctacaagttccgggacagactgaccctgaccagagacagctctctgaccgccgtgtacctggaactgaagggcctgcagcctgacgacagcggcatctacttttgcgccagagatcccttcggcgacagagcccctcactacaactaccacatggacgtgtggggcggaggcacagccgtgatagttagcagcgcttccacaaagggccctagcgtgttccctctggctcctagcagcaagtctacaagcggaggaacagctgccctgggctgcctggtggaagattactttcctgagcctgtgaccgtgtcctggaacagcggtgctctgacttctggcgtgcacacctttccagccgtgctgcaaagcagcggcctgtactctctgagcagcgtggtcacagtgccaagctctagcctgggcacccagacctacatctgcaatgtgaaccacaagcctagcaacaccaaggtggacgacaaggtggaacccaagagctgcgacaagacccacacctgtcctccatgtcctgctccagaactgctggccggaccttccgtgttcctgtttcctccaaagcctaaggacaccctgatgatcagcagaacccctgaagtgacctgcgtggtggtggatgtgtctcacgaggaccctgaagtgaagttcaattggtacgtggacggcgtggaagtgcacaacgccaagaccaagcctagagaggaacagtacaacagcacctacagagtggtgtccgtgctgaccgtgctgcaccaggattggctgaacggcaaagagtacaagtgcaaggtgtccaacaaggccctgcctgcccctgaggaaaagaccatcagcaaggccaagggccagcctagggaaccccaggtttacaccctgcctccatgccgcgacgaactgaccaagaaccaggtgtccctgtggtgcctggtcaagggcttctacccttccgatatcgccgtggaatgggagagcaatggccagcctgagaacaactacaagacaacccctcctgtgctggacagcgacggctcattcttcctgtacagcaagctgacagtggacaagagcagatggcagcagggcaacgtgttcagctgcagcgtgctgcatgaagccctgcacagccactacacccagaagtccctgtctctgagccccggcaagtgataaggatccgatctggtactgcatgcacgcaatgctagctgcccctttcccgtcctgggtaccccgagtctcccccgacctcgggtcccaggtatgctcccacctccacctgccccactcaccacctctgctagttccagacacctcccaagcacgcagcaatgcagctcaaaacgcttagcctagccacacccccacgggaaacagcagtgattaacctttagcaataaacgaaagtttaactaagctatactaaccccagggttggtcaatttcgtgccagccacaccctcgagctagcaaaaaaaaaaaaaaaaaaaaaaaaaaaaaagcatatgactaaaaaaaaaaaaaaaaaaaaaaaaaaaaaaaaaaaaaaaaaaaaaaaaaaaaaaaaaaaaaaaaaaaaaa

SEQ ID NO: 748 - RNA, 1169 nt, synthetic construct
  source 1..1169: mol_type = other RNA
agaataaactagtattcttctggtccccacagactcagagagaacccgccaccatggattggatttggagaatcctgttcctcgtgggcgccgctaccggagcccactccgaagttgtgctgacacagagccccgccatcctgagtgttagccctggcgatagagtgatcctgagctgcagagcctctcagggcctcgattcttctcacctggcctggtacagattcaagcggggacagatccccacactggtcatcttcggcaccagcaacagagccagaggcacccctgatagattttccggctctggcagcggagccgacttcaccctgacaatcagcagagtggaacccgaggacttcgccacctactactgccagagatacggcggcacccctatcacatttggcggcggaaccacactggacaagaaacgtacggtggccgctcctagcgtgttcatctttccacctagcgacagaaagctgaagtctggcacagcctctgtcgtgtgcctgctcaacaacttctaccccagagaagccaaggtgcagtggaaggtggacaacgccctgcagagcggcaatagccaagagagcgtgaccgagcaggacagcaaggactctacctacagcctgagcagcacactgaccctgagcaaggccgactacgagaagcacaaagtgtacgcctgcgaagtgacccaccagggcctttctagccctgtgaccaagagcttcaaccggggcgagtgctgataaggatccgatctggtactgcatgcacgcaatgctagctgcccctttcccgtcctgggtaccccgagtctcccccgacctcgggtcccaggtatgctcccacctccacctgccccactcaccacctctgctagttccagacacctcccaagcacgcagcaatgcagctcaaaacgcttagcctagccacacccccacgggaaacagcagtgattaacctttagcaataaacgaaagtttaactaagctatactaaccccagggttggtcaatttcgtgccagccacaccctcgagctagcaaaaaaaaaaaaaaaaaaaaaaaaaaaaaagcatatgactaaaaaaaaaaaaaaaaaaaaaaaaaaaaaaaaaaaaaaaaaaaaaaaaaaaaaaaaaaaaaaaaaaaaaa

SEQ ID NO: 749 - RNA, 2057 nt, synthetic construct
  source 1..2057: mol_type = other RNA
agaataaactagtattcttctggtccccacagactcagagagaacccgccaccatggattggatttggagaatcctgttcctcgtgggcgccgctaccggagcccactcccaaggcagactgtttcagtctggcgccgaagtgaaaagaccaggcgcctctgtgcggatcagctgcagagctgacgacgacccctacaccgacgacgataccttcaccaagtactggacccactggatcagacaggcccctggacaaagacctgagtggctgggagtgatcagccctcacttcgccagacctatctacagctacaagttccgggacagactgaccctgaccagagacagctctctgaccgccgtgtacctggaactgaagggcctgcagcctgacgacagcggcatctacttttgcgccagagatcccttcggcgacagagcccctcactacaactaccacatggacgtgtggggcggaggcacagccgtgatagtgtcttccggcggaggtggaagtggtggtggcggtagcggaggcggtgggtccggaggtggtggatctgaagttgtgctgacacagagccctgccatcctgagtgtgtccccaggcgatagagtgatcctgtcctgcagagcctctcagggcctcgattcttctcacctggcctggtacagattcaagcggggacagatccccacactggtcatcttcggcaccagcaacagagccagaggcacccctgatagattttccggctctggcagcggagccgacttcaccctgacaatcagcagagtggaacccgaggacttcgccacctactactgccagagatacggcggcacccctatcacatttggcggcggaaccacactggacaagaaaggcggaggtggaagtggtggtggcggtagcggaggcggtgggtccggaggtggtggatctgaacctaagagcagcgacaagacccacacctgtcctccatgtcctgctccagaactgctcggcggaccttccgtgttcctgtttcctccaaagcctaaggacaccctgatgatcagcagaacccctgaagtgacctgcgtggtggtggatgtgtctcacgaggacccagaagtgaagttcaattggtacgtggacggcgtggaagtgcacaacgccaagaccaagcctagagaggaacagtacaacagcacctacagagtggtgtccgtgctgacagtgctgcaccaggattggctgaacggcaaagagtacaagtgcaaggtgtccaacaaggccctgcctgctcctatcgagaaaaccatcagcaaggccaagggccagcctagggaaccccaggtttacacactgcctccaagccgcgaggaaatgaccaagaaccaggtgtccctgacctgcctcgtgaagggcttctacccttccgatatcgccgtggaatgggagagcaatggccagcctgagaacaactacaagacaacccctcctgtgctggacagcgacggctcattcttcctgtacagcaagctgactgtggataagtcccggtggcagcagggcaacgtgttcagctgttctgtgatgcacgaagccctgcacaaccactacacccagaaaagcctgtctctgagccccggcaagtgataaggatccgatctggtactgcatgcacgcaatgctagctgcccctttcccgtcctgggtaccccgagtctcccccgacctcgggtcccaggtatgctcccacctccacctgccccactcaccacctctgctagttccagacacctcccaagcacgcagcaatgcagctcaaaacgcttagcctagccacacccccacgggaaacagcagtgattaacctttagcaataaacgaaagtttaactaagctatactaaccccagggttggtcaatttcgtgccagccacaccctcgagctagcaaaaaaaaaaaaaaaaaaaaaaaaaaaaaagcatatgactaaaaaaaaaaaaaaaaaaaaaaaaaaaaaaaaaaaaaaaaaaaaaaaaaaaaaaaaaaaaaaaaaaaaaa

SEQ ID NO: 750 - RNA, 2057 nt, synthetic construct
  source 1..2057: mol_type = other RNA
agaataaactagtattcttctggtccccacagactcagagagaacccgccaccatggattggatttggagaatcctgttcctcgtgggcgccgctaccggagcccactcccaaggcagactgtttcagtctggcgccgaagtgaaaagaccaggcgcctctgtgcggatcagctgcagagctgacgacgacccctacaccgacgacgataccttcaccaagtactggacccactggatcagacaggcccctggacaaagacctgagtggctgggagtgatcagccctcacttcgccagacctatctacagctacaagttccgggacagactgaccctgaccagagacagctctctgaccgccgtgtacctggaactgaagggcctgcagcctgacgacagcggcatctacttttgcgccagagatcccttcggcgacagagcccctcactacaactaccacatggacgtgtggggcggaggcacagccgtgatagtgtcttccggcggaggtggaagtggtggtggcggtagcggaggcggtgggtccggaggtggtggatctgaagttgtgctgacacagagccctgccatcctgagtgtgtccccaggcgatagagtgatcctgtcctgcagagcctctcagggcctcgattcttctcacctggcctggtacagattcaagcggggacagatccccacactggtcatcttcggcaccagcaacagagccagaggcacccctgatagattttccggctctggcagcggagccgacttcaccctgacaatcagcagagtggaacccgaggacttcgccacctactactgccagagatacggcggcacccctatcacatttggcggcggaaccacactggacaagaaaggcggaggtggaagtggtggtggcggtagcggaggcggtgggtccggaggtggtggatctgaacctaagagcagcgacaagacccacacctgtcctccatgtcctgctccagaactgctggccggaccttccgtgttcctgtttcctccaaagcctaaggacaccctgatgatcagcagaacccctgaagtgacctgcgtggtggtggatgtgtctcacgaggaccctgaagtgaagttcaattggtacgtggacggcgtggaagtgcacaacgccaagaccaagcctagagaggaacagtacaacagcacctacagagtggtgtccgtgctgaccgtgctgcaccaggattggctgaacggcaaagagtacaagtgcaaggtgtccaacaaggccctgcctctgcctgaggaaaagaccatcagcaaggccaagggccagcctagggaaccccaggtttacacactgcctccaagccgcgaggaaatgaccaagaaccaggtgtccctgacctgcctcgtgaagggcttctacccttccgatatcgccgtggaatgggagagcaatggccagcctgagaacaactacaagacaacccctcctgtgctggacagcgacggctcattcttcctgtacagcaagctgaccgtggacaagtccagatggcagcagggcaacgtgttcagctgtagcgtgctgcacgaagccctgcacagccactacacccagaaaagcctgtctctgagccccggcaaatgataaggatccgatctggtactgcatgcacgcaatgctagctgcccctttcccgtcctgggtaccccgagtctcccccgacctcgggtcccaggtatgctcccacctccacctgccccactcaccacctctgctagttccagacacctcccaagcacgcagcaatgcagctcaaaacgcttagcctagccacacccccacgggaaacagcagtgattaacctttagcaataaacgaaagtttaactaagctatactaaccccagggttggtcaatttcgtgccagccacaccctcgagctagcaaaaaaaaaaaaaaaaaaaaaaaaaaaaaagcatatgactaaaaaaaaaaaaaaaaaaaaaaaaaaaaaaaaaaaaaaaaaaaaaaaaaaaaaaaaaaaaaaaaaaaaaa

SEQ ID NO: 751 - RNA, 2057 nt, synthetic construct
  source 1..2057: mol_type = other RNA
agaataaactagtattcttctggtccccacagactcagagagaacccgccaccatggattggatttggagaatcctgttcctcgtgggcgccgctaccggagcccactcccaaggcagactgtttcagtctggcgccgaagtgaaaagaccaggcgcctctgtgcggatcagctgcagagctgacgacgacccctacaccgacgacgataccttcaccaagtactggacccactggatcagacaggcccctggacaaagacctgagtggctgggagtgatcagccctcacttcgccagacctatctacagctacaagttccgggacagactgaccctgaccagagacagctctctgaccgccgtgtacctggaactgaagggcctgcagcctgacgacagcggcatctacttttgcgccagagatcccttcggcgacagagcccctcactacaactaccacatggacgtgtggggcggaggcacagccgtgatagtgtcttccggcggaggtggaagtggtggtggcggtagcggaggcggtgggtccggaggtggtggatctgaagttgtgctgacacagagccctgccatcctgagtgtgtccccaggcgatagagtgatcctgtcctgcagagcctctcagggcctcgattcttctcacctggcctggtacagattcaagcggggacagatccccacactggtcatcttcggcaccagcaacagagccagaggcacccctgatagattttccggctctggcagcggagccgacttcaccctgacaatcagcagagtggaacccgaggacttcgccacctactactgccagagatacggcggcacccctatcacatttggcggcggaaccacactggacaagaaaggcggaggtggaagtggtggtggcggtagcggaggcggtgggtccggaggtggtggatctgaacctaagagcagcgacaagacccacacctgtcctccatgtcctgctccagaactgctggccggaccttccgtgttcctgtttcctccaaagcctaaggacaccctgatgatcagcagaacccctgaagtgacctgcgtggtggtggatgtgtctcacgaggaccctgaagtgaagttcaattggtacgtggacggcgtggaagtgcacaacgccaagaccaagcctagagaggaacagtacaacagcacctacagagtggtgtccgtgctgaccgtgctgcaccaggattggctgaacggcaaagagtacaagtgcaaggtgtccaacaaggccctgcctgcccctgaggaaaagaccatcagcaaggccaagggccagcctagggaaccccaggtttacacactgcctccaagccgcgaggaaatgaccaagaaccaggtgtccctgacctgcctcgtgaagggcttctacccttccgatatcgccgtggaatgggagagcaatggccagcctgagaacaactacaagacaacccctcctgtgctggacagcgacggctcattcttcctgtacagcaagctgaccgtggacaagtccagatggcagcagggcaacgtgttcagctgtagcgtgctgcacgaagccctgcacagccactacacccagaaaagcctgtctctgagccccggcaaatgataaggatccgatctggtactgcatgcacgcaatgctagctgcccctttcccgtcctgggtaccccgagtctcccccgacctcgggtcccaggtatgctcccacctccacctgccccactcaccacctctgctagttccagacacctcccaagcacgcagcaatgcagctcaaaacgcttagcctagccacacccccacgggaaacagcagtgattaacctttagcaataaacgaaagtttaactaagctatactaaccccagggttggtcaatttcgtgccagccacaccctcgagctagcaaaaaaaaaaaaaaaaaaaaaaaaaaaaaagcatatgactaaaaaaaaaaaaaaaaaaaaaaaaaaaaaaaaaaaaaaaaaaaaaaaaaaaaaaaaaaaaaaaaaaaaaa

SEQ ID NO: 752 - RNA, 2057 nt, synthetic construct; identical to SEQ ID NO: 749
  source 1..2057: mol_type = other RNA

SEQ ID NO: 753 - RNA, 2057 nt, synthetic construct; identical to SEQ ID NO: 468
  source 1..2057: mol_type = other RNA

SEQ ID NO: 754 - RNA, 2057 nt, synthetic construct; identical to SEQ ID NO: 750
  source 1..2057: mol_type = other RNA

SEQ ID NO: 755 - RNA, 2057 nt, synthetic construct; identical to SEQ ID NO: 751
  source 1..2057: mol_type = other RNA

SEQ ID NO: 756 - RNA, 2057 nt, synthetic construct
  source 1..2057: mol_type = other RNA
agaataaactagtattcttctggtccccacagactcagagagaacccgccaccatggattggatttggagaatcctgttcctcgtgggcgccgctaccggagcccactcccaaggcagactgtttcagtctggcgccgaagtgaaaagaccaggcgcctctgtgcggatcagctgcagagctgacgacgacccctacaccgacgacgataccttcaccaagtactggacccactggatcagacaggcccctggacaaagacctgagtggctgggagtgatcagccctcacttcgccagacctatctacagctacaagttccgggacagactgaccctgaccagagacagctctctgaccgccgtgtacctggaactgaagggcctgcagcctgacgacagcggcatctacttttgcgccagagatcccttcggcgacagagcccctcactacaactaccacatggacgtgtggggcggaggcacagccgtgatagtgtcttccggcggaggtggaagtggtggtggcggtagcggaggcggtgggtccggaggtggtggatctgaagttgtgctgacacagagccctgccatcctgagtgtgtccccaggcgatagagtgatcctgtcctgcagagcctctcagggcctcgattcttctcacctggcctggtacagattcaagcggggacagatccccacactggtcatcttcggcaccagcaacagagccagaggcacccctgatagattttccggctctggcagcggagccgacttcaccctgacaatcagcagagtggaacccgaggacttcgccacctactactgccagagatacggcggcacccctatcacatttggcggcggaaccacactggacaagaaaggcggaggtggaagtggtggtggcggtagcggaggcggtgggtccggaggtggtggatctgaacctaagagcagcgacaagacccacacctgtcctccatgtcctgctccagaactgctcggcggaccttccgtgttcctgtttcctccaaagcctaaggacaccctgatgatcagcagaacccctgaagtgacctgcgtggtggtggatgtgtctcacgaggacccagaagtgaagttcaattggtacgtggacggcgtggaagtgcacaacgccaagaccaagcctagagaggaacagtacaacagcacctacagagtggtgtccgtgctgacagtgctgcaccaggattggctgaacggcaaagagtacaagtgcaaggtgtccaacaaggccctgcctgctcctatcgagaaaaccatcagcaaggccaagggccagcctagggaaccccaggtttacacactgcctccaagccgcgacgaactgaccaagaaccaggtgtccctgacctgcctcgtgaagggcttctacccttccgatatcgccgtggaatgggagagcaatggccagcctgagaacaactacaagacaacccctcctgtgctggacagcgacggctcattcttcctgtacagcaagctgactgtggataagtcccggtggcagcagggcaacgtgttcagctgttctgtgatgcacgaagccctgcacaaccactacacccagaaaagcctgtctctgagccccggcaagtgataaggatccgatctggtactgcatgcacgcaatgctagctgcccctttcccgtcctgggtaccccgagtctcccccgacctcgggtcccaggtatgctcccacctccacctgccccactcaccacctctgctagttccagacacctcccaagcacgcagcaatgcagctcaaaacgcttagcctagccacacccccacgggaaacagcagtgattaacctttagcaataaacgaaagtttaactaagctatactaaccccagggttggtcaatttcgtgccagccacaccctcgagctagcaaaaaaaaaaaaaaaaaaaaaaaaaaaaaagcatatgactaaaaaaaaaaaaaaaaaaaaaaaaaaaaaaaaaaaaaaaaaaaaaaaaaaaaaaaaaaaaaaaaaaaaaa

SEQ ID NO: 757 - RNA, 2057 nt, synthetic construct
  source 1..2057: mol_type = other RNA
agaataaactagtattcttctggtccccacagactcagagagaacccgccaccatggattggatttggagaatcctgttcctcgtgggcgccgctaccggagcccactcccaaggcagactgtttcagtctggcgccgaagtgaaaagaccaggcgcctctgtgcggatcagctgcagagctgacgacgacccctacaccgacgacgataccttcaccaagtactggacccactggatcagacaggcccctggacaaagacctgagtggctgggagtgatcagccctcacttcgccagacctatctacagctacaagttccgggacagactgaccctgaccagagacagctctctgaccgccgtgtacctggaactgaagggcctgcagcctgacgacagcggcatctacttttgcgccagagatcccttcggcgacagagcccctcactacaactaccacatggacgtgtggggcggaggcacagccgtgatagtgtcttccggcggaggtggaagtggtggtggcggtagcggaggcggtgggtccggaggtggtggatctgaagttgtgctgacacagagccctgccatcctgagtgtgtccccaggcgatagagtgatcctgtcctgcagagcctctcagggcctcgattcttctcacctggcctggtacagattcaagcggggacagatccccacactggtcatcttcggcaccagcaacagagccagaggcacccctgatagattttccggctctggcagcggagccgacttcaccctgacaatcagcagagtggaacccgaggacttcgccacctactactgccagagatacggcggcacccctatcacatttggcggcggaaccacactggacaagaaaggcggaggtggaagtggtggtggcggtagcggaggcggtgggtccggaggtggtggatctgaacctaagagcagcgacaagacccacacctgtcctccatgtcctgctccagaactgctcggcggaccttccgtgttcctgtttcctccaaagcctaaggacaccctgatgatcagcagaacccctgaagtgacctgcgtggtggtggatgtgtctcacgaggacccagaagtgaagttcaattggtacgtggacggcgtggaagtgcacaacgccaagaccaagcctagagaggaacagtacaacagcacctacagagtggtgtccgtgctgacagtgctgcaccaggattggctgaacggcaaagagtacaagtgcaaggtgtccaacaaggccctgcctgctcctatcgagaaaaccatcagcaaggccaagggccagcctagggaaccccaggtttacacactgcctccaagccgcgacgaactgaccaagaaccaggtgtccctgacctgcctcgtgaagggcttctacccttccgatatcgccgtggaatgggagagcaatggccagcctgagaacaactacaagacaacccctcctgtgctggacagcgacggctcattcttcctgtacagcaagctgaccgtggacaagtccagatggcagcagggcaacgtgttcagctgtagcgtgctgcacgaagccctgcacagccactacacccagaaaagcctgtctctgagccccggcaaatgataaggatccgatctggtactgcatgcacgcaatgctagctgcccctttcccgtcctgggtaccccgagtctcccccgacctcgggtcccaggtatgctcccacctccacctgccccactcaccacctctgctagttccagacacctcccaagcacgcagcaatgcagctcaaaacgcttagcctagccacacccccacgggaaacagcagtgattaacctttagcaataaacgaaagtttaactaagctatactaaccccagggttggtcaatttcgtgccagccacaccctcgagctagcaaaaaaaaaaaaaaaaaaaaaaaaaaaaaagcatatgactaaaaaaaaaaaaaaaaaaaaaaaaaaaaaaaaaaaaaaaaaaaaaaaaaaaaaaaaaaaaaaaaaaaaaa

SEQ ID NO: 758 - RNA, 2057 nt, synthetic construct
  source 1..2057: mol_type = other RNA
agaataaactagtattcttctggtccccacagactcagagagaacccgccaccatggattggatttggagaatcctgttcctcgtgggcgccgctaccggagcccactcccaaggcagactgtttcagtctggcgccgaagtgaaaagaccaggcgcctctgtgcggatcagctgcagagctgacgacgacccctacaccgacgacgataccttcaccaagtactggacccactggatcagacaggcccctggacaaagacctgagtggctgggagtgatcagccctcacttcgccagacctatctacagctacaagttccgggacagactgaccctgaccagagacagctctctgaccgccgtgtacctggaactgaagggcctgcagcctgacgacagcggcatctacttttgcgccagagatcccttcggcgacagagcccctcactacaactaccacatggacgtgtggggcggaggcacagccgtgatagtgtcttccggcggaggtggaagtggtggtggcggtagcggaggcggtgggtccggaggtggtggatctgaagttgtgctgacacagagccctgccatcctgagtgtgtccccaggcgatagagtgatcctgtcctgcagagcctctcagggcctcgattcttctcacctggcctggtacagattcaagcggggacagatccccacactggtcatcttcggcaccagcaacagagccagaggcacccctgatagattttccggctctggcagcggagccgacttcaccctgacaatcagcagagtggaacccgaggacttcgccacctactactgccagagatacggcggcacccctatcacatttggcggcggaaccacactggacaagaaaggcggaggtggaagtggtggtggcggtagcggaggcggtgggtccggaggtggtggatctgaacctaagagcagcgacaagacccacacctgtcctccatgtcctgctccagaactgctggccggaccttccgtgttcctgtttcctccaaagcctaaggacaccctgatgatcagcagaacccctgaagtgacctgcgtggtggtggatgtgtctcacgaggaccctgaagtgaagttcaattggtacgtggacggcgtggaagtgcacaacgccaagaccaagcctagagaggaacagtacaacagcacctacagagtggtgtccgtgctgaccgtgctgcaccaggattggctgaacggcaaagagtacaagtgcaaggtgtccaacaaggccctgcctctgcctgaggaaaagaccatcagcaaggccaagggccagcctagggaaccccaggtttacacactgcctccaagccgcgacgaactgaccaagaaccaggtgtccctgacctgcctcgtgaagggcttctacccttccgatatcgccgtggaatgggagagcaatggccagcctgagaacaactacaagacaacccctcctgtgctggacagcgacggctcattcttcctgtacagcaagctgaccgtggacaagtccagatggcagcagggcaacgtgttcagctgtagcgtgctgcacgaagccctgcacagccactacacccagaaaagcctgtctctgagccccggcaaatgataaggatccgatctggtactgcatgcacgcaatgctagctgcccctttcccgtcctgggtaccccgagtctcccccgacctcgggtcccaggtatgctcccacctccacctgccccactcaccacctctgctagttccagacacctcccaagcacgcagcaatgcagctcaaaacgcttagcctagccacacccccacgggaaacagcagtgattaacctttagcaataaacgaaagtttaactaagctatactaaccccagggttggtcaatttcgtgccagccacaccctcgagctagcaaaaaaaaaaaaaaaaaaaaaaaaaaaaaagcatatgactaaaaaaaaaaaaaaaaaaaaaaaaaaaaaaaaaaaaaaaaaaaaaaaaaaaaaaaaaaaaaaaaaaaaaa

SEQ ID NO: 759 - RNA, 2057 nt, synthetic construct
  source 1..2057: mol_type = other RNA
agaataaactagtattcttctggtccccacagactcagagagaacccgccaccatggattggatttggagaatcctgttcctcgtgggcgccgctaccggagcccactcccaaggcagactgtttcagtctggcgccgaagtgaaaagaccaggcgcctctgtgcggatcagctgcagagctgacgacgacccctacaccgacgacgataccttcaccaagtactggacccactggatcagacaggcccctggacaaagacctgagtggctgggagtgatcagccctcacttcgccagacctatctacagctacaagttccgggacagactgaccctgaccagagacagctctctgaccgccgtgtacctggaactgaagggcctgcagcctgacgacagcggcatctacttttgcgccagagatcccttcggcgacagagcccctcactacaactaccacatggacgtgtggggcggaggcacagccgtgatagtgtcttccggcggaggtggaagtggtggtggcggtagcggaggcggtgggtccggaggtggtggatctgaagttgtgctgacacagagccctgccatcctgagtgtgtccccaggcgatagagtgatcctgtcctgcagagcctctcagggcctcgattcttctcacctggcctggtacagattcaagcggggacagatccccacactggtcatcttcggcaccagcaacagagccagaggcacccctgatagattttccggctctggcagcggagccgacttcaccctgacaatcagcagagtggaacccgaggacttcgccacctactactgccagagatacggcggcacccctatcacatttggcggcggaaccacactggacaagaaaggcggaggtggaagtggtggtggcggtagcggaggcggtgggtccggaggtggtggatctgaacctaagagcagcgacaagacccacacctgtcctccatgtcctgctccagaactgctggccggaccttccgtgttcctgtttcctccaaagcctaaggacaccctgatgatcagcagaacccctgaagtgacctgcgtggtggtggatgtgtctcacgaggaccctgaagtgaagttcaattggtacgtggacggcgtggaagtgcacaacgccaagaccaagcctagagaggaacagtacaacagcacctacagagtggtgtccgtgctgaccgtgctgcaccaggattggctgaacggcaaagagtacaagtgcaaggtgtccaacaaggccctgcctgcccctgaggaaaagaccatcagcaaggccaagggccagcctagggaaccccaggtttacacactgcctccaagccgcgacgaactgaccaagaaccaggtgtccctgacctgcctcgtgaagggcttctacccttccgatatcgccgtggaatgggagagcaatggccagcctgagaacaactacaagacaacccctcctgtgctggacagcgacggctcattcttcctgtacagcaagctgaccgtggacaagtccagatggcagcagggcaacgtgttcagctgtagcgtgctgcacgaagccctgcacagccactacacccagaaaagcctgtctctgagccccggcaaatgataaggatccgatctggtactgcatgcacgcaatgctagctgcccctttcccgtcctgggtaccccgagtctcccccgacctcgggtcccaggtatgctcccacctccacctgccccactcaccacctctgctagttccagacacctcccaagcacgcagcaatgcagctcaaaacgcttagcctagccacacccccacgggaaacagcagtgattaacctttagcaataaacgaaagtttaactaagctatactaaccccagggttggtcaatttcgtgccagccacaccctcgagctagcaaaaaaaaaaaaaaaaaaaaaaaaaaaaaagcatatgactaaaaaaaaaaaaaaaaaaaaaaaaaaaaaaaaaaaaaaaaaaaaaaaaaaaaaaaaaaaaaaaaaaaaaa

SEQ ID NO: 760 - RNA, 2057 nt, synthetic construct
  source 1..2057: mol_type = other RNA
agaataaactagtattcttctggtccccacagactcagagagaacccgccaccatggattggatttggagaatcctgttcctcgtgggcgccgctaccggagcccactccgaagtggtgctgacacagagccccgccatcctgagtgttagccctggcgatagagtgatcctgagctgcagagcctctcagggcctcgattcttctcacctggcctggtacagattcaagcggggacagatccccacactggtcatcttcggcaccagcaacagagccagaggcacccctgatagattttccggctctggcagcggagccgacttcaccctgacaatcagcagagtggaacccgaggacttcgccacctactactgccagagatacggcggcacccctatcacatttggcggcggaaccacactggacaagaaaggcggaggtggaagtggtggtggcggtagcggaggcggtgggtccggaggtggtggatctcaaggcagactgtttcagtctggcgccgaagtgaaaagaccaggcgcctctgtgcggatcagctgtagagccgacgacgacccctacaccgacgatgacaccttcaccaagtactggacccactggatcagacaggcccctggacaaagacctgagtggctgggagtgatcagccctcacttcgccagacctatctacagctacaagttccgggacagactgaccctgaccagagacagctctctgaccgccgtgtacctggaactgaagggcctgcagcctgacgacagcggcatctacttttgcgccagagatcccttcggcgacagggctccccactacaactaccacatggatgtgtggggaggcggcacagccgtgattgtgtcttccggcggcggaggaagcggaggcggaggttctggtggcggaggctcaggcggtggcggatctgaacctaagagcagcgacaagacccacacctgtcctccatgtcctgctccagaactgctcggcggaccttccgtgttcctgtttcctccaaagcctaaggacaccctgatgatcagcagaacccctgaagtgacctgcgtggtggtggatgtgtctcacgaggacccagaagtgaagttcaattggtacgtggacggcgtggaagtgcacaacgccaagaccaagcctagagaggaacagtacaacagcacctacagagtggtgtccgtgctgacagtgctgcaccaggattggctgaacggcaaagagtacaagtgcaaggtgtccaacaaggccctgcctgctcctatcgagaaaaccatcagcaaggccaagggccagcctagggaaccccaggtttacacactgcctccaagccgcgaggaaatgaccaagaaccaggtgtccctgacctgcctcgtgaagggcttctacccttccgatatcgccgtggaatgggagagcaatggccagcctgagaacaactacaagacaacccctcctgtgctggacagcgacggctcattcttcctgtacagcaagctgactgtggataagtcccggtggcagcagggcaacgtgttcagctgttctgtgatgcacgaagccctgcacaaccactacacccagaaaagcctgtctctgagccccggcaagtgataaggatccgatctggtactgcatgcacgcaatgctagctgcccctttcccgtcctgggtaccccgagtctcccccgacctcgggtcccaggtatgctcccacctccacctgccccactcaccacctctgctagttccagacacctcccaagcacgcagcaatgcagctcaaaacgcttagcctagccacacccccacgggaaacagcagtgattaacctttagcaataaacgaaagtttaactaagctatactaaccccagggttggtcaatttcgtgccagccacaccctcgagctagcaaaaaaaaaaaaaaaaaaaaaaaaaaaaaagcatatgactaaaaaaaaaaaaaaaaaaaaaaaaaaaaaaaaaaaaaaaaaaaaaaaaaaaaaaaaaaaaaaaaaaaaaa

SEQ ID NO: 761 - RNA, 2057 nt, synthetic construct
  source 1..2057: mol_type = other RNA
agaataaactagtattcttctggtccccacagactcagagagaacccgccaccatggattggatttggagaatcctgttcctcgtgggcgccgctaccggagcccactccgaagtggtgctgacacagagccccgccatcctgagtgttagccctggcgatagagtgatcctgagctgcagagcctctcagggcctcgattcttctcacctggcctggtacagattcaagcggggacagatccccacactggtcatcttcggcaccagcaacagagccagaggcacccctgatagattttccggctctggcagcggagccgacttcaccctgacaatcagcagagtggaacccgaggacttcgccacctactactgccagagatacggcggcacccctatcacatttggcggcggaaccacactggacaagaaaggcggaggtggaagtggtggtggcggtagcggaggcggtgggtccggaggtggtggatctcaaggcagactgtttcagtctggcgccgaagtgaaaagaccaggcgcctctgtgcggatcagctgtagagccgacgacgacccctacaccgacgatgacaccttcaccaagtactggacccactggatcagacaggcccctggacaaagacctgagtggctgggagtgatcagccctcacttcgccagacctatctacagctacaagttccgggacagactgaccctgaccagagacagctctctgaccgccgtgtacctggaactgaagggcctgcagcctgacgacagcggcatctacttttgcgccagagatcccttcggcgacagggctccccactacaactaccacatggatgtgtggggaggcggcacagccgtgattgtgtcttccggcggcggaggaagcggaggcggaggttctggtggcggaggctcaggcggtggcggatctgaacctaagagcagcgacaagacccacacctgtcctccatgtcctgctccagaactgctggccggaccttccgtgttcctgtttcctccaaagcctaaggacaccctgatgatcagcagaacccctgaagtgacctgcgtggtggtggatgtgtctcacgaggaccctgaagtgaagttcaattggtacgtggacggcgtggaagtgcacaacgccaagaccaagcctagagaggaacagtacaacagcacctacagagtggtgtccgtgctgaccgtgctgcaccaggattggctgaacggcaaagagtacaagtgcaaggtgtccaacaaggccctgcctctgcctgaggaaaagaccatcagcaaggccaagggccagcctagggaaccccaggtttacacactgcctccaagccgcgaggaaatgaccaagaaccaggtgtccctgacctgcctcgtgaagggcttctacccttccgatatcgccgtggaatgggagagcaatggccagcctgagaacaactacaagacaacccctcctgtgctggacagcgacggctcattcttcctgtacagcaagctgaccgtggacaagtccagatggcagcagggcaacgtgttcagctgtagcgtgctgcacgaagccctgcacagccactacacccagaaaagcctgtctctgagccccggcaaatgataaggatccgatctggtactgcatgcacgcaatgctagctgcccctttcccgtcctgggtaccccgagtctcccccgacctcgggtcccaggtatgctcccacctccacctgccccactcaccacctctgctagttccagacacctcccaagcacgcagcaatgcagctcaaaacgcttagcctagccacacccccacgggaaacagcagtgattaacctttagcaataaacgaaagtttaactaagctatactaaccccagggttggtcaatttcgtgccagccacaccctcgagctagcaaaaaaaaaaaaaaaaaaaaaaaaaaaaaagcatatgactaaaaaaaaaaaaaaaaaaaaaaaaaaaaaaaaaaaaaaaaaaaaaaaaaaaaaaaaaaaaaaaaaaaaaa

SEQ ID NO: 762 - RNA, 2057 nt, synthetic construct
  source 1..2057: mol_type = other RNA
agaataaactagtattcttctggtccccacagactcagagagaacccgccaccatggattggatttggagaatcctgttcctcgtgggcgccgctaccggagcccactccgaagtggtgctgacacagagccccgccatcctgagtgttagccctggcgatagagtgatcctgagctgcagagcctctcagggcctcgattcttctcacctggcctggtacagattcaagcggggacagatccccacactggtcatcttcggcaccagcaacagagccagaggcacccctgatagattttccggctctggcagcggagccgacttcaccctgacaatcagcagagtggaacccgaggacttcgccacctactactgccagagatacggcggcacccctatcacatttggcggcggaaccacactggacaagaaaggcggaggtggaagtggtggtggcggtagcggaggcggtgggtccggaggtggtggatctcaaggcagactgtttcagtctggcgccgaagtgaaaagaccaggcgcctctgtgcggatcagctgtagagccgacgacgacccctacaccgacgatgacaccttcaccaagtactggacccactggatcagacaggcccctggacaaagacctgagtggctgggagtgatcagccctcacttcgccagacctatctacagctacaagttccgggacagactgaccctgaccagagacagctctctgaccgccgtgtacctggaactgaagggcctgcagcctgacgacagcggcatctacttttgcgccagagatcccttcggcgacagggctccccactacaactaccacatggatgtgtggggaggcggcacagccgtgattgtgtcttccggcggcggaggaagcggaggcggaggttctggtggcggaggctcaggcggtggcggatctgaacctaagagcagcgacaagacccacacctgtcctccatgtcctgctccagaactgctggccggaccttccgtgttcctgtttcctccaaagcctaaggacaccctgatgatcagcagaacccctgaagtgacctgcgtggtggtggatgtgtctcacgaggaccctgaagtgaagttcaattggtacgtggacggcgtggaagtgcacaacgccaagaccaagcctagagaggaacagtacaacagcacctacagagtggtgtccgtgctgaccgtgctgcaccaggattggctgaacggcaaagagtacaagtgcaaggtgtccaacaaggccctgcctgcccctgaggaaaagaccatcagcaaggccaagggccagcctagggaaccccaggtttacacactgcctccaagccgcgaggaaatgaccaagaaccaggtgtccctgacctgcctcgtgaagggcttctacccttccgatatcgccgtggaatgggagagcaatggccagcctgagaacaactacaagacaacccctcctgtgctggacagcgacggctcattcttcctgtacagcaagctgaccgtggacaagtccagatggcagcagggcaacgtgttcagctgtagcgtgctgcacgaagccctgcacagccactacacccagaaaagcctgtctctgagccccggcaaatgataaggatccgatctggtactgcatgcacgcaatgctagctgcccctttcccgtcctgggtaccccgagtctcccccgacctcgggtcccaggtatgctcccacctccacctgccccactcaccacctctgctagttccagacacctcccaagcacgcagcaatgcagctcaaaacgcttagcctagccacacccccacgggaaacagcagtgattaacctttagcaataaacgaaagtttaactaagctatactaaccccagggttggtcaatttcgtgccagccacaccctcgagctagcaaaaaaaaaaaaaaaaaaaaaaaaaaaaaagcatatgactaaaaaaaaaaaaaaaaaaaaaaaaaaaaaaaaaaaaaaaaaaaaaaaaaaaaaaaaaaaaaaaaaaaaaa

SEQ ID NO: 763 - RNA, 2057 nt, synthetic construct; identical to SEQ ID NO: 760
  source 1..2057: mol_type = other RNA

SEQ ID NO: 764 - RNA, 2057 nt, synthetic construct; identical to SEQ ID NO: 469
  source 1..2057: mol_type = other RNA

SEQ ID NO: 765 - RNA, 2057 nt, synthetic construct; identical to SEQ ID NO: 761
  source 1..2057: mol_type = other RNA

SEQ ID NO: 766 - RNA, 2057 nt, synthetic construct; identical to SEQ ID NO: 762
  source 1..2057: mol_type = other RNA

SEQ ID NO: 767 - RNA, 2057 nt, synthetic construct
  source 1..2057: mol_type = other RNA
agaataaactagtattcttctggtccccacagactcagagagaacccgccaccatggattggatttggagaatcctgttcctcgtgggcgccgctaccggagcccactccgaagtggtgctgacacagagccccgccatcctgagtgttagccctggcgatagagtgatcctgagctgcagagcctctcagggcctcgattcttctcacctggcctggtacagattcaagcggggacagatccccacactggtcatcttcggcaccagcaacagagccagaggcacccctgatagattttccggctctggcagcggagccgacttcaccctgacaatcagcagagtggaacccgaggacttcgccacctactactgccagagatacggcggcacccctatcacatttggcggcggaaccacactggacaagaaaggcggaggtggaagtggtggtggcggtagcggaggcggtgggtccggaggtggtggatctcaaggcagactgtttcagtctggcgccgaagtgaaaagaccaggcgcctctgtgcggatcagctgtagagccgacgacgacccctacaccgacgatgacaccttcaccaagtactggacccactggatcagacaggcccctggacaaagacctgagtggctgggagtgatcagccctcacttcgccagacctatctacagctacaagttccgggacagactgaccctgaccagagacagctctctgaccgccgtgtacctggaactgaagggcctgcagcctgacgacagcggcatctacttttgcgccagagatcccttcggcgacagggctccccactacaactaccacatggatgtgtggggaggcggcacagccgtgattgtgtcttccggcggcggaggaagcggaggcggaggttctggtggcggaggctcaggcggtggcggatctgaacctaagagcagcgacaagacccacacctgtcctccatgtcctgctccagaactgctcggcggaccttccgtgttcctgtttcctccaaagcctaaggacaccctgatgatcagcagaacccctgaagtgacctgcgtggtggtggatgtgtctcacgaggacccagaagtgaagttcaattggtacgtggacggcgtggaagtgcacaacgccaagaccaagcctagagaggaacagtacaacagcacctacagagtggtgtccgtgctgacagtgctgcaccaggattggctgaacggcaaagagtacaagtgcaaggtgtccaacaaggccctgcctgctcctatcgagaaaaccatcagcaaggccaagggccagcctagggaaccccaggtttacacactgcctccaagccgcgacgaactgaccaagaaccaggtgtccctgacctgcctcgtgaagggcttctacccttccgatatcgccgtggaatgggagagcaatggccagcctgagaacaactacaagacaacccctcctgtgctggacagcgacggctcattcttcctgtacagcaagctgactgtggataagtcccggtggcagcagggcaacgtgttcagctgttctgtgatgcacgaagccctgcacaaccactacacccagaaaagcctgtctctgagccccggcaagtgataaggatccgatctggtactgcatgcacgcaatgctagctgcccctttcccgtcctgggtaccccgagtctcccccgacctcgggtcccaggtatgctcccacctccacctgccccactcaccacctctgctagttccagacacctcccaagcacgcagcaatgcagctcaaaacgcttagcctagccacacccccacgggaaacagcagtgattaacctttagcaataaacgaaagtttaactaagctatactaaccccagggttggtcaatttcgtgccagccacaccctcgagctagcaaaaaaaaaaaaaaaaaaaaaaaaaaaaaagcatatgactaaaaaaaaaaaaaaaaaaaaaaaaaaaaaaaaaaaaaaaaaaaaaaaaaaaaaaaaaaaaaaaaaaaaaa

SEQ ID NO: 768 - RNA, 2057 nt, synthetic construct
  source 1..2057: mol_type = other RNA
agaataaactagtattcttctggtccccacagactcagagagaacccgccaccatggattggatttggagaatcctgttcctcgtgggcgccgctaccggagcccactccgaagtggtgctgacacagagccccgccatcctgagtgttagccctggcgatagagtgatcctgagctgcagagcctctcagggcctcgattcttctcacctggcctggtacagattcaagcggggacagatccccacactggtcatcttcggcaccagcaacagagccagaggcacccctgatagattttccggctctggcagcggagccgacttcaccctgacaatcagcagagtggaacccgaggacttcgccacctactactgccagagatacggcggcacccctatcacatttggcggcggaaccacactggacaagaaaggcggaggtggaagtggtggtggcggtagcggaggcggtgggtccggaggtggtggatctcaaggcagactgtttcagtctggcgccgaagtgaaaagaccaggcgcctctgtgcggatcagctgtagagccgacgacgacccctacaccgacgatgacaccttcaccaagtactggacccactggatcagacaggcccctggacaaagacctgagtggctgggagtgatcagccctcacttcgccagacctatctacagctacaagttccgggacagactgaccctgaccagagacagctctctgaccgccgtgtacctggaactgaagggcctgcagcctgacgacagcggcatctacttttgcgccagagatcccttcggcgacagggctccccactacaactaccacatggatgtgtggggaggcggcacagccgtgattgtgtcttccggcggcggaggaagcggaggcggaggttctggtggcggaggctcaggcggtggcggatctgaacctaagagcagcgacaagacccacacctgtcctccatgtcctgctccagaactgctcggcggaccttccgtgttcctgtttcctccaaagcctaaggacaccctgatgatcagcagaacccctgaagtgacctgcgtggtggtggatgtgtctcacgaggacccagaagtgaagttcaattggtacgtggacggcgtggaagtgcacaacgccaagaccaagcctagagaggaacagtacaacagcacctacagagtggtgtccgtgctgacagtgctgcaccaggattggctgaacggcaaagagtacaagtgcaaggtgtccaacaaggccctgcctgctcctatcgagaaaaccatcagcaaggccaagggccagcctagggaaccccaggtttacacactgcctccaagccgcgacgaactgaccaagaaccaggtgtccctgacctgcctcgtgaagggcttctacccttccgatatcgccgtggaatgggagagcaatggccagcctgagaacaactacaagacaacccctcctgtgctggacagcgacggctcattcttcctgtacagcaagctgaccgtggacaagtccagatggcagcagggcaacgtgttcagctgtagcgtgctgcacgaagccctgcacagccactacacccagaaaagcctgtctctgagccccggcaaatgataaggatccgatctggtactgcatgcacgcaatgctagctgcccctttcccgtcctgggtaccccgagtctcccccgacctcgggtcccaggtatgctcccacctccacctgccccactcaccacctctgctagttccagacacctcccaagcacgcagcaatgcagctcaaaacgcttagcctagccacacccccacgggaaacagcagtgattaacctttagcaataaacgaaagtttaactaagctatactaaccccagggttggtcaatttcgtgccagccacaccctcgagctagcaaaaaaaaaaaaaaaaaaaaaaaaaaaaaagcatatgactaaaaaaaaaaaaaaaaaaaaaaaaaaaaaaaaaaaaaaaaaaaaaaaaaaaaaaaaaaaaaaaaaaaaaa

SEQ ID NO: 769 - RNA, 2057 nt, synthetic construct
  source 1..2057: mol_type = other RNA
agaataaactagtattcttctggtccccacagactcagagagaacccgccaccatggattggatttggagaatcctgttcctcgtgggcgccgctaccggagcccactccgaagtggtgctgacacagagccccgccatcctgagtgttagccctggcgatagagtgatcctgagctgcagagcctctcagggcctcgattcttctcacctggcctggtacagattcaagcggggacagatccccacactggtcatcttcggcaccagcaacagagccagaggcacccctgatagattttccggctctggcagcggagccgacttcaccctgacaatcagcagagtggaacccgaggacttcgccacctactactgccagagatacggcggcacccctatcacatttggcggcggaaccacactggacaagaaaggcggaggtggaagtggtggtggcggtagcggaggcggtgggtccggaggtggtggatctcaaggcagactgtttcagtctggcgccgaagtgaaaagaccaggcgcctctgtgcggatcagctgtagagccgacgacgacccctacaccgacgatgacaccttcaccaagtactggacccactggatcagacaggcccctggacaaagacctgagtggctgggagtgatcagccctcacttcgccagacctatctacagctacaagttccgggacagactgaccctgaccagagacagctctctgaccgccgtgtacctggaactgaagggcctgcagcctgacgacagcggcatctacttttgcgccagagatcccttcggcgacagggctccccactacaactaccacatggatgtgtggggaggcggcacagccgtgattgtgtcttccggcggcggaggaagcggaggcggaggttctggtggcggaggctcaggcggtggcggatctgaacctaagagcagcgacaagacccacacctgtcctccatgtcctgctccagaactgctggccggaccttccgtgttcctgtttcctccaaagcctaaggacaccctgatgatcagcagaacccctgaagtgacctgcgtggtggtggatgtgtctcacgaggaccctgaagtgaagttcaattggtacgtggacggcgtggaagtgcacaacgccaagaccaagcctagagaggaacagtacaacagcacctacagagtggtgtccgtgctgaccgtgctgcaccaggattggctgaacggcaaagagtacaagtgcaaggtgtccaacaaggccctgcctctgcctgaggaaaagaccatcagcaaggccaagggccagcctagggaaccccaggtttacacactgcctccaagccgcgacgaactgaccaagaaccaggtgtccctgacctgcctcgtgaagggcttctacccttccgatatcgccgtggaatgggagagcaatggccagcctgagaacaactacaagacaacccctcctgtgctggacagcgacggctcattcttcctgtacagcaagctgaccgtggacaagtccagatggcagcagggcaacgtgttcagctgtagcgtgctgcacgaagccctgcacagccactacacccagaaaagcctgtctctgagccccggcaaatgataaggatccgatctggtactgcatgcacgcaatgctagctgcccctttcccgtcctgggtaccccgagtctcccccgacctcgggtcccaggtatgctcccacctccacctgccccactcaccacctctgctagttccagacacctcccaagcacgcagcaatgcagctcaaaacgcttagcctagccacacccccacgggaaacagcagtgattaacctttagcaataaacgaaagtttaactaagctatactaaccccagggttggtcaatttcgtgccagccacaccctcgagctagcaaaaaaaaaaaaaaaaaaaaaaaaaaaaaagcatatgactaaaaaaaaaaaaaaaaaaaaaaaaaaaaaaaaaaaaaaaaaaaaaaaaaaaaaaaaaaaaaaaaaaaaaa

SEQ ID NO: 770 - RNA, 2057 nt, synthetic construct
  source 1..2057: mol_type = other RNA
agaataaactagtattcttctggtccccacagactcagagagaacccgccaccatggattggatttggagaatcctgttcctcgtgggcgccgctaccggagcccactccgaagtggtgctgacacagagccccgccatcctgagtgttagccctggcgatagagtgatcctgagctgcagagcctctcagggcctcgattcttctcacctggcctggtacagattcaagcggggacagatccccacactggtcatcttcggcaccagcaacagagccagaggcacccctgatagattttccggctctggcagcggagccgacttcaccctgacaatcagcagagtggaacccgaggacttcgccacctactactgccagagatacggcggcacccctatcacatttggcggcggaaccacactggacaagaaaggcggaggtggaagtggtggtggcggtagcggaggcggtgggtccggaggtggtggatctcaaggcagactgtttcagtctggcgccgaagtgaaaagaccaggcgcctctgtgcggatcagctgtagagccgacgacgacccctacaccgacgatgacaccttcaccaagtactggacccactggatcagacaggcccctggacaaagacctgagtggctgggagtgatcagccctcacttcgccagacctatctacagctacaagttccgggacagactgaccctgaccagagacagctctctgaccgccgtgtacctggaactgaagggcctgcagcctgacgacagcggcatctacttttgcgccagagatcccttcggcgacagggctccccactacaactaccacatggatgtgtggggaggcggcacagccgtgattgtgtcttccggcggcggaggaagcggaggcggaggttctggtggcggaggctcaggcggtggcggatctgaacctaagagcagcgacaagacccacacctgtcctccatgtcctgctccagaactgctggccggaccttccgtgttcctgtttcctccaaagcctaaggacaccctgatgatcagcagaacccctgaagtgacctgcgtggtggtggatgtgtctcacgaggaccctgaagtgaagttcaattggtacgtggacggcgtggaagtgcacaacgccaagaccaagcctagagaggaacagtacaacagcacctacagagtggtgtccgtgctgaccgtgctgcaccaggattggctgaacggcaaagagtacaagtgcaaggtgtccaacaaggccctgcctgcccctgaggaaaagaccatcagcaaggccaagggccagcctagggaaccccaggtttacacactgcctccaagccgcgacgaactgaccaagaaccaggtgtccctgacctgcctcgtgaagggcttctacccttccgatatcgccgtggaatgggagagcaatggccagcctgagaacaactacaagacaacccctcctgtgctggacagcgacggctcattcttcctgtacagcaagctgaccgtggacaagtccagatggcagcagggcaacgtgttcagctgtagcgtgctgcacgaagccctgcacagccactacacccagaaaagcctgtctctgagccccggcaaatgataaggatccgatctggtactgcatgcacgcaatgctagctgcccctttcccgtcctgggtaccccgagtctcccccgacctcgggtcccaggtatgctcccacctccacctgccccactcaccacctctgctagttccagacacctcccaagcacgcagcaatgcagctcaaaacgcttagcctagccacacccccacgggaaacagcagtgattaacctttagcaataaacgaaagtttaactaagctatactaaccccagggttggtcaatttcgtgccagccacaccctcgagctagcaaaaaaaaaaaaaaaaaaaaaaaaaaaaaagcatatgactaaaaaaaaaaaaaaaaaaaaaaaaaaaaaaaaaaaaaaaaaaaaaaaaaaaaaaaaaaaaaaaaaaaaaa

SEQ ID NO: 771 - RNA, 2072 nt, synthetic construct
  source 1..2072: mol_type = other RNA
agaataaactagtattcttctggtccccacagactcagagagaacccgccaccatggattggatttggagaatcctgttcctcgtgggcgccgctaccggagcccactcccaaggcagactgtttcagtctggcgccgaagtgaaaagaccaggcgcctctgtgcggatcagctgcagagctgacgacgacccctacaccgacgacgataccttcaccaagtactggacccactggatcagacaggcccctggacaaagacctgagtggctgggagtgatcagccctcacttcgccagacctatctacagctacaagttccgggacagactgaccctgaccagagacagctctctgaccgccgtgtacctggaactgaagggcctgcagcctgacgacagcggcatctacttttgcgccagagatcccttcggcgacagagcccctcactacaactaccacatggacgtgtggggcggaggcacagccgtgatagtgtcttccggcggcggaggaagcggaggcgggggttctggcggtggtggctctggtggcggaggctcaggcggtggcggatctgaagttgtgctgacacagagccctgccatcctgagtgtgtccccaggcgatagagtgatcctgtcctgcagagcctctcagggcctcgattcttctcacctggcctggtacagattcaagcggggacagatccccacactggtcatcttcggcaccagcaacagagccagaggcacccctgatagattttccggctctggcagcggagccgacttcaccctgacaatcagcagagtggaacccgaggacttcgccacctactactgccagagatacggcggcacccctatcacatttggcggcggaaccacactggacaagaaaggcggaggtggaagtggtggtggcggtagcggaggcggtgggtccggaggtggtggatctgaacctaagagcagcgacaagacccacacctgtcctccatgtcctgctccagaactgctcggcggaccttccgtgttcctgtttcctccaaagcctaaggacaccctgatgatcagcagaacccctgaagtgacctgcgtggtggtggatgtgtctcacgaggacccagaagtgaagttcaattggtacgtggacggcgtggaagtgcacaacgccaagaccaagcctagagaggaacagtacaacagcacctacagagtggtgtccgtgctgacagtgctgcaccaggattggctgaacggcaaagagtacaagtgcaaggtgtccaacaaggccctgcctgctcctatcgagaaaaccatcagcaaggccaagggccagcctagggaaccccaggtttacacactgcctccaagccgcgaggaaatgaccaagaaccaggtgtccctgacctgcctcgtgaagggcttctacccttccgatatcgccgtggaatgggagagcaatggccagcctgagaacaactacaagacaacccctcctgtgctggacagcgacggctcattcttcctgtacagcaagctgactgtggataagtcccggtggcagcagggcaacgtgttcagctgttctgtgatgcacgaagccctgcacaaccactacacccagaaaagcctgtctctgagccccggcaagtgataaggatccgatctggtactgcatgcacgcaatgctagctgcccctttcccgtcctgggtaccccgagtctcccccgacctcgggtcccaggtatgctcccacctccacctgccccactcaccacctctgctagttccagacacctcccaagcacgcagcaatgcagctcaaaacgcttagcctagccacacccccacgggaaacagcagtgattaacctttagcaataaacgaaagtttaactaagctatactaaccccagggttggtcaatttcgtgccagccacaccctcgagctagcaaaaaaaaaaaaaaaaaaaaaaaaaaaaaagcatatgactaaaaaaaaaaaaaaaaaaaaaaaaaaaaaaaaaaaaaaaaaaaaaaaaaaaaaaaaaaaaaaaaaaaaaa

SEQ ID NO: 772 - RNA, 2072 nt, synthetic construct
  source 1..2072: mol_type = other RNA
agaataaactagtattcttctggtccccacagactcagagagaacccgccaccatggattggatttggagaatcctgttcctcgtgggcgccgctaccggagcccactcccaaggcagactgtttcagtctggcgccgaagtgaaaagaccaggcgcctctgtgcggatcagctgcagagctgacgacgacccctacaccgacgacgataccttcaccaagtactggacccactggatcagacaggcccctggacaaagacctgagtggctgggagtgatcagccctcacttcgccagacctatctacagctacaagttccgggacagactgaccctgaccagagacagctctctgaccgccgtgtacctggaactgaagggcctgcagcctgacgacagcggcatctacttttgcgccagagatcccttcggcgacagagcccctcactacaactaccacatggacgtgtggggcggaggcacagccgtgatagtgtcttccggcggcggaggaagcggaggcgggggttctggcggtggtggctctggtggcggaggctcaggcggtggcggatctgaagttgtgctgacacagagccctgccatcctgagtgtgtccccaggcgatagagtgatcctgtcctgcagagcctctcagggcctcgattcttctcacctggcctggtacagattcaagcggggacagatccccacactggtcatcttcggcaccagcaacagagccagaggcacccctgatagattttccggctctggcagcggagccgacttcaccctgacaatcagcagagtggaacccgaggacttcgccacctactactgccagagatacggcggcacccctatcacatttggcggcggaaccacactggacaagaaaggcggaggtggaagtggtggtggcggtagcggaggcggtgggtccggaggtggtggatctgaacctaagagcagcgacaagacccacacctgtcctccatgtcctgctccagaactgctggccggaccttccgtgttcctgtttcctccaaagcctaaggacaccctgatgatcagcagaacccctgaagtgacctgcgtggtggtggatgtgtctcacgaggaccctgaagtgaagttcaattggtacgtggacggcgtggaagtgcacaacgccaagaccaagcctagagaggaacagtacaacagcacctacagagtggtgtccgtgctgaccgtgctgcaccaggattggctgaacggcaaagagtacaagtgcaaggtgtccaacaaggccctgcctctgcctgaggaaaagaccatcagcaaggccaagggccagcctagggaaccccaggtttacacactgcctccaagccgcgaggaaatgaccaagaaccaggtgtccctgacctgcctcgtgaagggcttctacccttccgatatcgccgtggaatgggagagcaatggccagcctgagaacaactacaagacaacccctcctgtgctggacagcgacggctcattcttcctgtacagcaagctgaccgtggacaagtccagatggcagcagggcaacgtgttcagctgtagcgtgctgcacgaagccctgcacagccactacacccagaaaagcctgtctctgagccccggcaaatgataaggatccgatctggtactgcatgcacgcaatgctagctgcccctttcccgtcctgggtaccccgagtctcccccgacctcgggtcccaggtatgctcccacctccacctgccccactcaccacctctgctagttccagacacctcccaagcacgcagcaatgcagctcaaaacgcttagcctagccacacccccacgggaaacagcagtgattaacctttagcaataaacgaaagtttaactaagctatactaaccccagggttggtcaatttcgtgccagccacaccctcgagctagcaaaaaaaaaaaaaaaaaaaaaaaaaaaaaagcatatgactaaaaaaaaaaaaaaaaaaaaaaaaaaaaaaaaaaaaaaaaaaaaaaaaaaaaaaaaaaaaaaaaaaaaaa

SEQ ID NO: 773 - RNA, 2072 nt, synthetic construct
  source 1..2072: mol_type = other RNA
agaataaactagtattcttctggtccccacagactcagagagaacccgccaccatggattggatttggagaatcctgttcctcgtgggcgccgctaccggagcccactcccaaggcagactgtttcagtctggcgccgaagtgaaaagaccaggcgcctctgtgcggatcagctgcagagctgacgacgacccctacaccgacgacgataccttcaccaagtactggacccactggatcagacaggcccctggacaaagacctgagtggctgggagtgatcagccctcacttcgccagacctatctacagctacaagttccgggacagactgaccctgaccagagacagctctctgaccgccgtgtacctggaactgaagggcctgcagcctgacgacagcggcatctacttttgcgccagagatcccttcggcgacagagcccctcactacaactaccacatggacgtgtggggcggaggcacagccgtgatagtgtcttccggcggcggaggaagcggaggcgggggttctggcggtggtggctctggtggcggaggctcaggcggtggcggatctgaagttgtgctgacacagagccctgccatcctgagtgtgtccccaggcgatagagtgatcctgtcctgcagagcctctcagggcctcgattcttctcacctggcctggtacagattcaagcggggacagatccccacactggtcatcttcggcaccagcaacagagccagaggcacccctgatagattttccggctctggcagcggagccgacttcaccctgacaatcagcagagtggaacccgaggacttcgccacctactactgccagagatacggcggcacccctatcacatttggcggcggaaccacactggacaagaaaggcggaggtggaagtggtggtggcggtagcggaggcggtgggtccggaggtggtggatctgaacctaagagcagcgacaagacccacacctgtcctccatgtcctgctccagaactgctggccggaccttccgtgttcctgtttcctccaaagcctaaggacaccctgatgatcagcagaacccctgaagtgacctgcgtggtggtggatgtgtctcacgaggaccctgaagtgaagttcaattggtacgtggacggcgtggaagtgcacaacgccaagaccaagcctagagaggaacagtacaacagcacctacagagtggtgtccgtgctgaccgtgctgcaccaggattggctgaacggcaaagagtacaagtgcaaggtgtccaacaaggccctgcctgcccctgaggaaaagaccatcagcaaggccaagggccagcctagggaaccccaggtttacacactgcctccaagccgcgaggaaatgaccaagaaccaggtgtccctgacctgcctcgtgaagggcttctacccttccgatatcgccgtggaatgggagagcaatggccagcctgagaacaactacaagacaacccctcctgtgctggacagcgacggctcattcttcctgtacagcaagctgaccgtggacaagtccagatggcagcagggcaacgtgttcagctgtagcgtgctgcacgaagccctgcacagccactacacccagaaaagcctgtctctgagccccggcaaatgataaggatccgatctggtactgcatgcacgcaatgctagctgcccctttcccgtcctgggtaccccgagtctcccccgacctcgggtcccaggtatgctcccacctccacctgccccactcaccacctctgctagttccagacacctcccaagcacgcagcaatgcagctcaaaacgcttagcctagccacacccccacgggaaacagcagtgattaacctttagcaataaacgaaagtttaactaagctatactaaccccagggttggtcaatttcgtgccagccacaccctcgagctagcaaaaaaaaaaaaaaaaaaaaaaaaaaaaaagcatatgactaaaaaaaaaaaaaaaaaaaaaaaaaaaaaaaaaaaaaaaaaaaaaaaaaaaaaaaaaaaaaaaaaaaaaa

SEQ ID NO: 774 - RNA, 2072 nt, synthetic construct; identical to SEQ ID NO: 771
  source 1..2072: mol_type = other RNA

SEQ ID NO: 775 - RNA, 2072 nt, synthetic construct; identical to SEQ ID NO: 470
  source 1..2072: mol_type = other RNA

SEQ ID NO: 776 - RNA, 2072 nt, synthetic construct; identical to SEQ ID NO: 772
  source 1..2072: mol_type = other RNA

SEQ ID NO: 777 - RNA, 2072 nt, synthetic construct; identical to SEQ ID NO: 773
  source 1..2072: mol_type = other RNA

SEQ ID NO: 778 - RNA, 2072 nt, synthetic construct
  source 1..2072: mol_type = other RNA
agaataaactagtattcttctggtccccacagactcagagagaacccgccaccatggattggatttggagaatcctgttcctcgtgggcgccgctaccggagcccactcccaaggcagactgtttcagtctggcgccgaagtgaaaagaccaggcgcctctgtgcggatcagctgcagagctgacgacgacccctacaccgacgacgataccttcaccaagtactggacccactggatcagacaggcccctggacaaagacctgagtggctgggagtgatcagccctcacttcgccagacctatctacagctacaagttccgggacagactgaccctgaccagagacagctctctgaccgccgtgtacctggaactgaagggcctgcagcctgacgacagcggcatctacttttgcgccagagatcccttcggcgacagagcccctcactacaactaccacatggacgtgtggggcggaggcacagccgtgatagtgtcttccggcggcggaggaagcggaggcgggggttctggcggtggtggctctggtggcggaggctcaggcggtggcggatctgaagttgtgctgacacagagccctgccatcctgagtgtgtccccaggcgatagagtgatcctgtcctgcagagcctctcagggcctcgattcttctcacctggcctggtacagattcaagcggggacagatccccacactggtcatcttcggcaccagcaacagagccagaggcacccctgatagattttccggctctggcagcggagccgacttcaccctgacaatcagcagagtggaacccgaggacttcgccacctactactgccagagatacggcggcacccctatcacatttggcggcggaaccacactggacaagaaaggcggaggtggaagtggtggtggcggtagcggaggcggtgggtccggaggtggtggatctgaacctaagagcagcgacaagacccacacctgtcctccatgtcctgctccagaactgctcggcggaccttccgtgttcctgtttcctccaaagcctaaggacaccctgatgatcagcagaacccctgaagtgacctgcgtggtggtggatgtgtctcacgaggacccagaagtgaagttcaattggtacgtggacggcgtggaagtgcacaacgccaagaccaagcctagagaggaacagtacaacagcacctacagagtggtgtccgtgctgacagtgctgcaccaggattggctgaacggcaaagagtacaagtgcaaggtgtccaacaaggccctgcctgctcctatcgagaaaaccatcagcaaggccaagggccagcctagggaaccccaggtttacacactgcctccaagccgcgacgaactgaccaagaaccaggtgtccctgacctgcctcgtgaagggcttctacccttccgatatcgccgtggaatgggagagcaatggccagcctgagaacaactacaagacaacccctcctgtgctggacagcgacggctcattcttcctgtacagcaagctgactgtggataagtcccggtggcagcagggcaacgtgttcagctgttctgtgatgcacgaagccctgcacaaccactacacccagaaaagcctgtctctgagccccggcaagtgataaggatccgatctggtactgcatgcacgcaatgctagctgcccctttcccgtcctgggtaccccgagtctcccccgacctcgggtcccaggtatgctcccacctccacctgccccactcaccacctctgctagttccagacacctcccaagcacgcagcaatgcagctcaaaacgcttagcctagccacacccccacgggaaacagcagtgattaacctttagcaataaacgaaagtttaactaagctatactaaccccagggttggtcaatttcgtgccagccacaccctcgagctagcaaaaaaaaaaaaaaaaaaaaaaaaaaaaaagcatatgactaaaaaaaaaaaaaaaaaaaaaaaaaaaaaaaaaaaaaaaaaaaaaaaaaaaaaaaaaaaaaaaaaaaaaa

SEQ ID NO: 779 - RNA, 2072 nt, synthetic construct
  source 1..2072: mol_type = other RNA
agaataaactagtattcttctggtccccacagactcagagagaacccgccaccatggattggatttggagaatcctgttcctcgtgggcgccgctaccggagcccactcccaaggcagactgtttcagtctggcgccgaagtgaaaagaccaggcgcctctgtgcggatcagctgcagagctgacgacgacccctacaccgacgacgataccttcaccaagtactggacccactggatcagacaggcccctggacaaagacctgagtggctgggagtgatcagccctcacttcgccagacctatctacagctacaagttccgggacagactgaccctgaccagagacagctctctgaccgccgtgtacctggaactgaagggcctgcagcctgacgacagcggcatctacttttgcgccagagatcccttcggcgacagagcccctcactacaactaccacatggacgtgtggggcggaggcacagccgtgatagtgtcttccggcggcggaggaagcggaggcgggggttctggcggtggtggctctggtggcggaggctcaggcggtggcggatctgaagttgtgctgacacagagccctgccatcctgagtgtgtccccaggcgatagagtgatcctgtcctgcagagcctctcagggcctcgattcttctcacctggcctggtacagattcaagcggggacagatccccacactggtcatcttcggcaccagcaacagagccagaggcacccctgatagattttccggctctggcagcggagccgacttcaccctgacaatcagcagagtggaacccgaggacttcgccacctactactgccagagatacggcggcacccctatcacatttggcggcggaaccacactggacaagaaaggcggaggtggaagtggtggtggcggtagcggaggcggtgggtccggaggtggtggatctgaacctaagagcagcgacaagacccacacctgtcctccatgtcctgctccagaactgctcggcggaccttccgtgttcctgtttcctccaaagcctaaggacaccctgatgatcagcagaacccctgaagtgacctgcgtggtggtggatgtgtctcacgaggacccagaagtgaagttcaattggtacgtggacggcgtggaagtgcacaacgccaagaccaagcctagagaggaacagtacaacagcacctacagagtggtgtccgtgctgacagtgctgcaccaggattggctgaacggcaaagagtacaagtgcaaggtgtccaacaaggccctgcctgctcctatcgagaaaaccatcagcaaggccaagggccagcctagggaaccccaggtttacacactgcctccaagccgcgacgaactgaccaagaaccaggtgtccctgacctgcctcgtgaagggcttctacccttccgatatcgccgtggaatgggagagcaatggccagcctgagaacaactacaagacaacccctcctgtgctggacagcgacggctcattcttcctgtacagcaagctgaccgtggacaagtccagatggcagcagggcaacgtgttcagctgtagcgtgctgcacgaagccctgcacagccactacacccagaaaagcctgtctctgagccccggcaaatgataaggatccgatctggtactgcatgcacgcaatgctagctgcccctttcccgtcctgggtaccccgagtctcccccgacctcgggtcccaggtatgctcccacctccacctgccccactcaccacctctgctagttccagacacctcccaagcacgcagcaatgcagctcaaaacgcttagcctagccacacccccacgggaaacagcagtgattaacctttagcaataaacgaaagtttaactaagctatactaaccccagggttggtcaatttcgtgccagccacaccctcgagctagcaaaaaaaaaaaaaaaaaaaaaaaaaaaaaagcatatgactaaaaaaaaaaaaaaaaaaaaaaaaaaaaaaaaaaaaaaaaaaaaaaaaaaaaaaaaaaaaaaaaaaaaaa

SEQ ID NO: 780 - RNA, 2072 nt, synthetic construct
  source 1..2072: mol_type = other RNA
agaataaactagtattcttctggtccccacagactcagagagaacccgccaccatggattggatttggagaatcctgttcctcgtgggcgccgctaccggagcccactcccaaggcagactgtttcagtctggcgccgaagtgaaaagaccaggcgcctctgtgcggatcagctgcagagctgacgacgacccctacaccgacgacgataccttcaccaagtactggacccactggatcagacaggcccctggacaaagacctgagtggctgggagtgatcagccctcacttcgccagacctatctacagctacaagttccgggacagactgaccctgaccagagacagctctctgaccgccgtgtacctggaactgaagggcctgcagcctgacgacagcggcatctacttttgcgccagagatcccttcggcgacagagcccctcactacaactaccacatggacgtgtggggcggaggcacagccgtgatagtgtcttccggcggcggaggaagcggaggcgggggttctggcggtggtggctctggtggcggaggctcaggcggtggcggatctgaagttgtgctgacacagagccctgccatcctgagtgtgtccccaggcgatagagtgatcctgtcctgcagagcctctcagggcctcgattcttctcacctggcctggtacagattcaagcggggacagatccccacactggtcatcttcggcaccagcaacagagccagaggcacccctgatagattttccggctctggcagcggagccgacttcaccctgacaatcagcagagtggaacccgaggacttcgccacctactactgccagagatacggcggcacccctatcacatttggcggcggaaccacactggacaagaaaggcggaggtggaagtggtggtggcggtagcggaggcggtgggtccggaggtggtggatctgaacctaagagcagcgacaagacccacacctgtcctccatgtcctgctccagaactgctggccggaccttccgtgttcctgtttcctccaaagcctaaggacaccctgatgatcagcagaacccctgaagtgacctgcgtggtggtggatgtgtctcacgaggaccctgaagtgaagttcaattggtacgtggacggcgtggaagtgcacaacgccaagaccaagcctagagaggaacagtacaacagcacctacagagtggtgtccgtgctgaccgtgctgcaccaggattggctgaacggcaaagagtacaagtgcaaggtgtccaacaaggccctgcctctgcctgaggaaaagaccatcagcaaggccaagggccagcctagggaaccccaggtttacacactgcctccaagccgcgacgaactgaccaagaaccaggtgtccctgacctgcctcgtgaagggcttctacccttccgatatcgccgtggaatgggagagcaatggccagcctgagaacaactacaagacaacccctcctgtgctggacagcgacggctcattcttcctgtacagcaagctgaccgtggacaagtccagatggcagcagggcaacgtgttcagctgtagcgtgctgcacgaagccctgcacagccactacacccagaaaagcctgtctctgagccccggcaaatgataaggatccgatctggtactgcatgcacgcaatgctagctgcccctttcccgtcctgggtaccccgagtctcccccgacctcgggtcccaggtatgctcccacctccacctgccccactcaccacctctgctagttccagacacctcccaagcacgcagcaatgcagctcaaaacgcttagcctagccacacccccacgggaaacagcagtgattaacctttagcaataaacgaaagtttaactaagctatactaaccccagggttggtcaatttcgtgccagccacaccctcgagctagcaaaaaaaaaaaaaaaaaaaaaaaaaaaaaagcatatgactaaaaaaaaaaaaaaaaaaaaaaaaaaaaaaaaaaaaaaaaaaaaaaaaaaaaaaaaaaaaaaaaaaaaaa

SEQ ID NO: 781 - RNA, 2072 nt, synthetic construct
  source 1..2072: mol_type = other RNA
agaataaactagtattcttctggtccccacagactcagagagaacccgccaccatggattggatttggagaatcctgttcctcgtgggcgccgctaccggagcccactcccaaggcagactgtttcagtctggcgccgaagtgaaaagaccaggcgcctctgtgcggatcagctgcagagctgacgacgacccctacaccgacgacgataccttcaccaagtactggacccactggatcagacaggcccctggacaaagacctgagtggctgggagtgatcagccctcacttcgccagacctatctacagctacaagttccgggacagactgaccctgaccagagacagctctctgaccgccgtgtacctggaactgaagggcctgcagcctgacgacagcggcatctacttttgcgccagagatcccttcggcgacagagcccctcactacaactaccacatggacgtgtggggcggaggcacagccgtgatagtgtcttccggcggcggaggaagcggaggcgggggttctggcggtggtggctctggtggcggaggctcaggcggtggcggatctgaagttgtgctgacacagagccctgccatcctgagtgtgtccccaggcgatagagtgatcctgtcctgcagagcctctcagggcctcgattcttctcacctggcctggtacagattcaagcggggacagatccccacactggtcatcttcggcaccagcaacagagccagaggcacccctgatagattttccggctctggcagcggagccgacttcaccctgacaatcagcagagtggaacccgaggacttcgccacctactactgccagagatacggcggcacccctatcacatttggcggcggaaccacactggacaagaaaggcggaggtggaagtggtggtggcggtagcggaggcggtgggtccggaggtggtggatctgaacctaagagcagcgacaagacccacacctgtcctccatgtcctgctccagaactgctggccggaccttccgtgttcctgtttcctccaaagcctaaggacaccctgatgatcagcagaacccctgaagtgacctgcgtggtggtggatgtgtctcacgaggaccctgaagtgaagttcaattggtacgtggacggcgtggaagtgcacaacgccaagaccaagcctagagaggaacagtacaacagcacctacagagtggtgtccgtgctgaccgtgctgcaccaggattggctgaacggcaaagagtacaagtgcaaggtgtccaacaaggccctgcctgcccctgaggaaaagaccatcagcaaggccaagggccagcctagggaaccccaggtttacacactgcctccaagccgcgacgaactgaccaagaaccaggtgtccctgacctgcctcgtgaagggcttctacccttccgatatcgccgtggaatgggagagcaatggccagcctgagaacaactacaagacaacccctcctgtgctggacagcgacggctcattcttcctgtacagcaagctgaccgtggacaagtccagatggcagcagggcaacgtgttcagctgtagcgtgctgcacgaagccctgcacagccactacacccagaaaagcctgtctctgagccccggcaaatgataaggatccgatctggtactgcatgcacgcaatgctagctgcccctttcccgtcctgggtaccccgagtctcccccgacctcgggtcccaggtatgctcccacctccacctgccccactcaccacctctgctagttccagacacctcccaagcacgcagcaatgcagctcaaaacgcttagcctagccacacccccacgggaaacagcagtgattaacctttagcaataaacgaaagtttaactaagctatactaaccccagggttggtcaatttcgtgccagccacaccctcgagctagcaaaaaaaaaaaaaaaaaaaaaaaaaaaaaagcatatgactaaaaaaaaaaaaaaaaaaaaaaaaaaaaaaaaaaaaaaaaaaaaaaaaaaaaaaaaaaaaaaaaaaaaaa

SEQ ID NO: 782 - RNA, 2072 nt, synthetic construct
  source 1..2072: mol_type = other RNA
agaataaactagtattcttctggtccccacagactcagagagaacccgccaccatggattggatttggagaatcctgttcctcgtgggcgccgctaccggagcccactccgaagtggtgctgacacagagccccgccatcctgagtgttagccctggcgatagagtgatcctgagctgcagagcctctcagggcctcgattcttctcacctggcctggtacagattcaagcggggacagatccccacactggtcatcttcggcaccagcaacagagccagaggcacccctgatagattttccggctctggcagcggagccgacttcaccctgacaatcagcagagtggaacccgaggacttcgccacctactactgccagagatacggcggcacccctatcacatttggcggcggaaccacactggacaagaaaggcggcggaggaagcggaggcggaggttctggtggtggtggctctggtggcggaggctcaggcggtggcggatctcaaggcagactgtttcagtctggcgccgaagtgaaaagaccaggcgcctctgtgcggatcagctgtagagccgacgacgacccctacaccgacgatgacaccttcaccaagtactggacccactggatcagacaggcccctggacaaagacctgagtggctgggagtgatcagccctcacttcgccagacctatctacagctacaagttccgggacagactgaccctgaccagagacagctctctgaccgccgtgtacctggaactgaagggcctgcagcctgacgacagcggcatctacttttgcgccagagatcccttcggcgacagggctccccactacaactaccacatggatgtgtggggaggcggcacagccgtgattgtgtcttccggcggcggaggaagcggaggcggaggttctggtggcggaggctcaggcggtggcggatctgaacctaagagcagcgacaagacccacacctgtcctccatgtcctgctccagaactgctcggcggaccttccgtgttcctgtttcctccaaagcctaaggacaccctgatgatcagcagaacccctgaagtgacctgcgtggtggtggatgtgtctcacgaggacccagaagtgaagttcaattggtacgtggacggcgtggaagtgcacaacgccaagaccaagcctagagaggaacagtacaacagcacctacagagtggtgtccgtgctgacagtgctgcaccaggattggctgaacggcaaagagtacaagtgcaaggtgtccaacaaggccctgcctgctcctatcgagaaaaccatcagcaaggccaagggccagcctagggaaccccaggtttacacactgcctccaagccgcgaggaaatgaccaagaaccaggtgtccctgacctgcctcgtgaagggcttctacccttccgatatcgccgtggaatgggagagcaatggccagcctgagaacaactacaagacaacccctcctgtgctggacagcgacggctcattcttcctgtacagcaagctgactgtggataagtcccggtggcagcagggcaacgtgttcagctgttctgtgatgcacgaagccctgcacaaccactacacccagaaaagcctgtctctgagccccggcaagtgataaggatccgatctggtactgcatgcacgcaatgctagctgcccctttcccgtcctgggtaccccgagtctcccccgacctcgggtcccaggtatgctcccacctccacctgccccactcaccacctctgctagttccagacacctcccaagcacgcagcaatgcagctcaaaacgcttagcctagccacacccccacgggaaacagcagtgattaacctttagcaataaacgaaagtttaactaagctatactaaccccagggttggtcaatttcgtgccagccacaccctcgagctagcaaaaaaaaaaaaaaaaaaaaaaaaaaaaaagcatatgactaaaaaaaaaaaaaaaaaaaaaaaaaaaaaaaaaaaaaaaaaaaaaaaaaaaaaaaaaaaaaaaaaaaaaa

SEQ ID NO: 783 - RNA, 2072 nt, synthetic construct
  source 1..2072: mol_type = other RNA
agaataaactagtattcttctggtccccacagactcagagagaacccgccaccatggattggatttggagaatcctgttcctcgtgggcgccgctaccggagcccactccgaagtggtgctgacacagagccccgccatcctgagtgttagccctggcgatagagtgatcctgagctgcagagcctctcagggcctcgattcttctcacctggcctggtacagattcaagcggggacagatccccacactggtcatcttcggcaccagcaacagagccagaggcacccctgatagattttccggctctggcagcggagccgacttcaccctgacaatcagcagagtggaacccgaggacttcgccacctactactgccagagatacggcggcacccctatcacatttggcggcggaaccacactggacaagaaaggcggcggaggaagcggaggcggaggttctggtggtggtggctctggtggcggaggctcaggcggtggcggatctcaaggcagactgtttcagtctggcgccgaagtgaaaagaccaggcgcctctgtgcggatcagctgtagagccgacgacgacccctacaccgacgatgacaccttcaccaagtactggacccactggatcagacaggcccctggacaaagacctgagtggctgggagtgatcagccctcacttcgccagacctatctacagctacaagttccgggacagactgaccctgaccagagacagctctctgaccgccgtgtacctggaactgaagggcctgcagcctgacgacagcggcatctacttttgcgccagagatcccttcggcgacagggctccccactacaactaccacatggatgtgtggggaggcggcacagccgtgattgtgtcttccggcggcggaggaagcggaggcggaggttctggtggcggaggctcaggcggtggcggatctgaacctaagagcagcgacaagacccacacctgtcctccatgtcctgctccagaactgctggccggaccttccgtgttcctgtttcctccaaagcctaaggacaccctgatgatcagcagaacccctgaagtgacctgcgtggtggtggatgtgtctcacgaggaccctgaagtgaagttcaattggtacgtggacggcgtggaagtgcacaacgccaagaccaagcctagagaggaacagtacaacagcacctacagagtggtgtccgtgctgaccgtgctgcaccaggattggctgaacggcaaagagtacaagtgcaaggtgtccaacaaggccctgcctctgcctgaggaaaagaccatcagcaaggccaagggccagcctagggaaccccaggtttacacactgcctccaagccgcgaggaaatgaccaagaaccaggtgtccctgacctgcctcgtgaagggcttctacccttccgatatcgccgtggaatgggagagcaatggccagcctgagaacaactacaagacaacccctcctgtgctggacagcgacggctcattcttcctgtacagcaagctgaccgtggacaagtccagatggcagcagggcaacgtgttcagctgtagcgtgctgcacgaagccctgcacagccactacacccagaaaagcctgtctctgagccccggcaaatgataaggatccgatctggtactgcatgcacgcaatgctagctgcccctttcccgtcctgggtaccccgagtctcccccgacctcgggtcccaggtatgctcccacctccacctgccccactcaccacctctgctagttccagacacctcccaagcacgcagcaatgcagctcaaaacgcttagcctagccacacccccacgggaaacagcagtgattaacctttagcaataaacgaaagtttaactaagctatactaaccccagggttggtcaatttcgtgccagccacaccctcgagctagcaaaaaaaaaaaaaaaaaaaaaaaaaaaaaagcatatgactaaaaaaaaaaaaaaaaaaaaaaaaaaaaaaaaaaaaaaaaaaaaaaaaaaaaaaaaaaaaaaaaaaaaaa

SEQ ID NO: 784 - RNA, 2072 nt, synthetic construct
  source 1..2072: mol_type = other RNA
agaataaactagtattcttctggtccccacagactcagagagaacccgccaccatggattggatttggagaatcctgttcctcgtgggcgccgctaccggagcccactccgaagtggtgctgacacagagccccgccatcctgagtgttagccctggcgatagagtgatcctgagctgcagagcctctcagggcctcgattcttctcacctggcctggtacagattcaagcggggacagatccccacactggtcatcttcggcaccagcaacagagccagaggcacccctgatagattttccggctctggcagcggagccgacttcaccctgacaatcagcagagtggaacccgaggacttcgccacctactactgccagagatacggcggcacccctatcacatttggcggcggaaccacactggacaagaaaggcggcggaggaagcggaggcggaggttctggtggtggtggctctggtggcggaggctcaggcggtggcggatctcaaggcagactgtttcagtctggcgccgaagtgaaaagaccaggcgcctctgtgcggatcagctgtagagccgacgacgacccctacaccgacgatgacaccttcaccaagtactggacccactggatcagacaggcccctggacaaagacctgagtggctgggagtgatcagccctcacttcgccagacctatctacagctacaagttccgggacagactgaccctgaccagagacagctctctgaccgccgtgtacctggaactgaagggcctgcagcctgacgacagcggcatctacttttgcgccagagatcccttcggcgacagggctccccactacaactaccacatggatgtgtggggaggcggcacagccgtgattgtgtcttccggcggcggaggaagcggaggcggaggttctggtggcggaggctcaggcggtggcggatctgaacctaagagcagcgacaagacccacacctgtcctccatgtcctgctccagaactgctggccggaccttccgtgttcctgtttcctccaaagcctaaggacaccctgatgatcagcagaacccctgaagtgacctgcgtggtggtggatgtgtctcacgaggaccctgaagtgaagttcaattggtacgtggacggcgtggaagtgcacaacgccaagaccaagcctagagaggaacagtacaacagcacctacagagtggtgtccgtgctgaccgtgctgcaccaggattggctgaacggcaaagagtacaagtgcaaggtgtccaacaaggccctgcctgcccctgaggaaaagaccatcagcaaggccaagggccagcctagggaaccccaggtttacacactgcctccaagccgcgaggaaatgaccaagaaccaggtgtccctgacctgcctcgtgaagggcttctacccttccgatatcgccgtggaatgggagagcaatggccagcctgagaacaactacaagacaacccctcctgtgctggacagcgacggctcattcttcctgtacagcaagctgaccgtggacaagtccagatggcagcagggcaacgtgttcagctgtagcgtgctgcacgaagccctgcacagccactacacccagaaaagcctgtctctgagccccggcaaatgataaggatccgatctggtactgcatgcacgcaatgctagctgcccctttcccgtcctgggtaccccgagtctcccccgacctcgggtcccaggtatgctcccacctccacctgccccactcaccacctctgctagttccagacacctcccaagcacgcagcaatgcagctcaaaacgcttagcctagccacacccccacgggaaacagcagtgattaacctttagcaataaacgaaagtttaactaagctatactaaccccagggttggtcaatttcgtgccagccacaccctcgagctagcaaaaaaaaaaaaaaaaaaaaaaaaaaaaaagcatatgactaaaaaaaaaaaaaaaaaaaaaaaaaaaaaaaaaaaaaaaaaaaaaaaaaaaaaaaaaaaaaaaaaaaaaa

SEQ ID NO: 785 - RNA, 2072 nt, synthetic construct; identical to SEQ ID NO: 782
  source 1..2072: mol_type = other RNA

SEQ ID NO: 786 - RNA, 2072 nt, synthetic construct; identical to SEQ ID NO: 471
  source 1..2072: mol_type = other RNA

SEQ ID NO: 787 - RNA, 2072 nt, synthetic construct; identical to SEQ ID NO: 783
  source 1..2072: mol_type = other RNA

SEQ ID NO: 788 - RNA, 2072 nt, synthetic construct; identical to SEQ ID NO: 784
  source 1..2072: mol_type = other RNA

SEQ ID NO: 789 - RNA, 2072 nt, synthetic construct
  source 1..2072: mol_type = other RNA
agaataaactagtattcttctggtccccacagactcagagagaacccgccaccatggattggatttggagaatcctgttcctcgtgggcgccgctaccggagcccactccgaagtggtgctgacacagagccccgccatcctgagtgttagccctggcgatagagtgatcctgagctgcagagcctctcagggcctcgattcttctcacctggcctggtacagattcaagcggggacagatccccacactggtcatcttcggcaccagcaacagagccagaggcacccctgatagattttccggctctggcagcggagccgacttcaccctgacaatcagcagagtggaacccgaggacttcgccacctactactgccagagatacggcggcacccctatcacatttggcggcggaaccacactggacaagaaaggcggcggaggaagcggaggcggaggttctggtggtggtggctctggtggcggaggctcaggcggtggcggatctcaaggcagactgtttcagtctggcgccgaagtgaaaagaccaggcgcctctgtgcggatcagctgtagagccgacgacgacccctacaccgacgatgacaccttcaccaagtactggacccactggatcagacaggcccctggacaaagacctgagtggctgggagtgatcagccctcacttcgccagacctatctacagctacaagttccgggacagactgaccctgaccagagacagctctctgaccgccgtgtacctggaactgaagggcctgcagcctgacgacagcggcatctacttttgcgccagagatcccttcggcgacagggctccccactacaactaccacatggatgtgtggggaggcggcacagccgtgattgtgtcttccggcggcggaggaagcggaggcggaggttctggtggcggaggctcaggcggtggcggatctgaacctaagagcagcgacaagacccacacctgtcctccatgtcctgctccagaactgctcggcggaccttccgtgttcctgtttcctccaaagcctaaggacaccctgatgatcagcagaacccctgaagtgacctgcgtggtggtggatgtgtctcacgaggacccagaagtgaagttcaattggtacgtggacggcgtggaagtgcacaacgccaagaccaagcctagagaggaacagtacaacagcacctacagagtggtgtccgtgctgacagtgctgcaccaggattggctgaacggcaaagagtacaagtgcaaggtgtccaacaaggccctgcctgctcctatcgagaaaaccatcagcaaggccaagggccagcctagggaaccccaggtttacacactgcctccaagccgcgacgaactgaccaagaaccaggtgtccctgacctgcctcgtgaagggcttctacccttccgatatcgccgtggaatgggagagcaatggccagcctgagaacaactacaagacaacccctcctgtgctggacagcgacggctcattcttcctgtacagcaagctgactgtggataagtcccggtggcagcagggcaacgtgttcagctgttctgtgatgcacgaagccctgcacaaccactacacccagaaaagcctgtctctgagccccggcaagtgataaggatccgatctggtactgcatgcacgcaatgctagctgcccctttcccgtcctgggtaccccgagtctcccccgacctcgggtcccaggtatgctcccacctccacctgccccactcaccacctctgctagttccagacacctcccaagcacgcagcaatgcagctcaaaacgcttagcctagccacacccccacgggaaacagcagtgattaacctttagcaataaacgaaagtttaactaagctatactaaccccagggttggtcaatttcgtgccagccacaccctcgagctagcaaaaaaaaaaaaaaaaaaaaaaaaaaaaaagcatatgactaaaaaaaaaaaaaaaaaaaaaaaaaaaaaaaaaaaaaaaaaaaaaaaaaaaaaaaaaaaaaaaaaaaaaa

SEQ ID NO: 790 - RNA, 2072 nt, synthetic construct
  source 1..2072: mol_type = other RNA
agaataaactagtattcttctggtccccacagactcagagagaacccgccaccatggattggatttggagaatcctgttcctcgtgggcgccgctaccggagcccactccgaagtggtgctgacacagagccccgccatcctgagtgttagccctggcgatagagtgatcctgagctgcagagcctctcagggcctcgattcttctcacctggcctggtacagattcaagcggggacagatccccacactggtcatcttcggcaccagcaacagagccagaggcacccctgatagattttccggctctggcagcggagccgacttcaccctgacaatcagcagagtggaacccgaggacttcgccacctactactgccagagatacggcggcacccctatcacatttggcggcggaaccacactggacaagaaaggcggcggaggaagcggaggcggaggttctggtggtggtggctctggtggcggaggctcaggcggtggcggatctcaaggcagactgtttcagtctggcgccgaagtgaaaagaccaggcgcctctgtgcggatcagctgtagagccgacgacgacccctacaccgacgatgacaccttcaccaagtactggacccactggatcagacaggcccctggacaaagacctgagtggctgggagtgatcagccctcacttcgccagacctatctacagctacaagttccgggacagactgaccctgaccagagacagctctctgaccgccgtgtacctggaactgaagggcctgcagcctgacgacagcggcatctacttttgcgccagagatcccttcggcgacagggctccccactacaactaccacatggatgtgtggggaggcggcacagccgtgattgtgtcttccggcggcggaggaagcggaggcggaggttctggtggcggaggctcaggcggtggcggatctgaacctaagagcagcgacaagacccacacctgtcctccatgtcctgctccagaactgctcggcggaccttccgtgttcctgtttcctccaaagcctaaggacaccctgatgatcagcagaacccctgaagtgacctgcgtggtggtggatgtgtctcacgaggacccagaagtgaagttcaattggtacgtggacggcgtggaagtgcacaacgccaagaccaagcctagagaggaacagtacaacagcacctacagagtggtgtccgtgctgacagtgctgcaccaggattggctgaacggcaaagagtacaagtgcaaggtgtccaacaaggccctgcctgctcctatcgagaaaaccatcagcaaggccaagggccagcctagggaaccccaggtttacacactgcctccaagccgcgacgaactgaccaagaaccaggtgtccctgacctgcctcgtgaagggcttctacccttccgatatcgccgtggaatgggagagcaatggccagcctgagaacaactacaagacaacccctcctgtgctggacagcgacggctcattcttcctgtacagcaagctgaccgtggacaagtccagatggcagcagggcaacgtgttcagctgtagcgtgctgcacgaagccctgcacagccactacacccagaaaagcctgtctctgagccccggcaaatgataaggatccgatctggtactgcatgcacgcaatgctagctgcccctttcccgtcctgggtaccccgagtctcccccgacctcgggtcccaggtatgctcccacctccacctgccccactcaccacctctgctagttccagacacctcccaagcacgcagcaatgcagctcaaaacgcttagcctagccacacccccacgggaaacagcagtgattaacctttagcaataaacgaaagtttaactaagctatactaaccccagggttggtcaatttcgtgccagccacaccctcgagctagcaaaaaaaaaaaaaaaaaaaaaaaaaaaaaagcatatgactaaaaaaaaaaaaaaaaaaaaaaaaaaaaaaaaaaaaaaaaaaaaaaaaaaaaaaaaaaaaaaaaaaaaaa

SEQ ID NO: 791 - RNA, 2072 nt, synthetic construct
  source 1..2072: mol_type = other RNA
agaataaactagtattcttctggtccccacagactcagagagaacccgccaccatggattggatttggagaatcctgttcctcgtgggcgccgctaccggagcccactccgaagtggtgctgacacagagccccgccatcctgagtgttagccctggcgatagagtgatcctgagctgcagagcctctcagggcctcgattcttctcacctggcctggtacagattcaagcggggacagatccccacactggtcatcttcggcaccagcaacagagccagaggcacccctgatagattttccggctctggcagcggagccgacttcaccctgacaatcagcagagtggaacccgaggacttcgccacctactactgccagagatacggcggcacccctatcacatttggcggcggaaccacactggacaagaaaggcggcggaggaagcggaggcggaggttctggtggtggtggctctggtggcggaggctcaggcggtggcggatctcaaggcagactgtttcagtctggcgccgaagtgaaaagaccaggcgcctctgtgcggatcagctgtagagccgacgacgacccctacaccgacgatgacaccttcaccaagtactggacccactggatcagacaggcccctggacaaagacctgagtggctgggagtgatcagccctcacttcgccagacctatctacagctacaagttccgggacagactgaccctgaccagagacagctctctgaccgccgtgtacctggaactgaagggcctgcagcctgacgacagcggcatctacttttgcgccagagatcccttcggcgacagggctccccactacaactaccacatggatgtgtggggaggcggcacagccgtgattgtgtcttccggcggcggaggaagcggaggcggaggttctggtggcggaggctcaggcggtggcggatctgaacctaagagcagcgacaagacccacacctgtcctccatgtcctgctccagaactgctggccggaccttccgtgttcctgtttcctccaaagcctaaggacaccctgatgatcagcagaacccctgaagtgacctgcgtggtggtggatgtgtctcacgaggaccctgaagtgaagttcaattggtacgtggacggcgtggaagtgcacaacgccaagaccaagcctagagaggaacagtacaacagcacctacagagtggtgtccgtgctgaccgtgctgcaccaggattggctgaacggcaaagagtacaagtgcaaggtgtccaacaaggccctgcctctgcctgaggaaaagaccatcagcaaggccaagggccagcctagggaaccccaggtttacacactgcctccaagccgcgacgaactgaccaagaaccaggtgtccctgacctgcctcgtgaagggcttctacccttccgatatcgccgtggaatgggagagcaatggccagcctgagaacaactacaagacaacccctcctgtgctggacagcgacggctcattcttcctgtacagcaagctgaccgtggacaagtccagatggcagcagggcaacgtgttcagctgtagcgtgctgcacgaagccctgcacagccactacacccagaaaagcctgtctctgagccccggcaaatgataaggatccgatctggtactgcatgcacgcaatgctagctgcccctttcccgtcctgggtaccccgagtctcccccgacctcgggtcccaggtatgctcccacctccacctgccccactcaccacctctgctagttccagacacctcccaagcacgcagcaatgcagctcaaaacgcttagcctagccacacccccacgggaaacagcagtgattaacctttagcaataaacgaaagtttaactaagctatactaaccccagggttggtcaatttcgtgccagccacaccctcgagctagcaaaaaaaaaaaaaaaaaaaaaaaaaaaaaagcatatgactaaaaaaaaaaaaaaaaaaaaaaaaaaaaaaaaaaaaaaaaaaaaaaaaaaaaaaaaaaaaaaaaaaaaaa

SEQ ID NO: 792 - RNA, 2072 nt, synthetic construct
  source 1..2072: mol_type = other RNA
agaataaactagtattcttctggtccccacagactcagagagaacccgccaccatggattggatttggagaatcctgttcctcgtgggcgccgctaccggagcccactccgaagtggtgctgacacagagccccgccatcctgagtgttagccctggcgatagagtgatcctgagctgcagagcctctcagggcctcgattcttctcacctggcctggtacagattcaagcggggacagatccccacactggtcatcttcggcaccagcaacagagccagaggcacccctgatagattttccggctctggcagcggagccgacttcaccctgacaatcagcagagtggaacccgaggacttcgccacctactactgccagagatacggcggcacccctatcacatttggcggcggaaccacactggacaagaaaggcggcggaggaagcggaggcggaggttctggtggtggtggctctggtggcggaggctcaggcggtggcggatctcaaggcagactgtttcagtctggcgccgaagtgaaaagaccaggcgcctctgtgcggatcagctgtagagccgacgacgacccctacaccgacgatgacaccttcaccaagtactggacccactggatcagacaggcccctggacaaagacctgagtggctgggagtgatcagccctcacttcgccagacctatctacagctacaagttccgggacagactgaccctgaccagagacagctctctgaccgccgtgtacctggaactgaagggcctgcagcctgacgacagcggcatctacttttgcgccagagatcccttcggcgacagggctccccactacaactaccacatggatgtgtggggaggcggcacagccgtgattgtgtcttccggcggcggaggaagcggaggcggaggttctggtggcggaggctcaggcggtggcggatctgaacctaagagcagcgacaagacccacacctgtcctccatgtcctgctccagaactgctggccggaccttccgtgttcctgtttcctccaaagcctaaggacaccctgatgatcagcagaacccctgaagtgacctgcgtggtggtggatgtgtctcacgaggaccctgaagtgaagttcaattggtacgtggacggcgtggaagtgcacaacgccaagaccaagcctagagaggaacagtacaacagcacctacagagtggtgtccgtgctgaccgtgctgcaccaggattggctgaacggcaaagagtacaagtgcaaggtgtccaacaaggccctgcctgcccctgaggaaaagaccatcagcaaggccaagggccagcctagggaaccccaggtttacacactgcctccaagccgcgacgaactgaccaagaaccaggtgtccctgacctgcctcgtgaagggcttctacccttccgatatcgccgtggaatgggagagcaatggccagcctgagaacaactacaagacaacccctcctgtgctggacagcgacggctcattcttcctgtacagcaagctgaccgtggacaagtccagatggcagcagggcaacgtgttcagctgtagcgtgctgcacgaagccctgcacagccactacacccagaaaagcctgtctctgagccccggcaaatgataaggatccgatctggtactgcatgcacgcaatgctagctgcccctttcccgtcctgggtaccccgagtctcccccgacctcgggtcccaggtatgctcccacctccacctgccccactcaccacctctgctagttccagacacctcccaagcacgcagcaatgcagctcaaaacgcttagcctagccacacccccacgggaaacagcagtgattaacctttagcaataaacgaaagtttaactaagctatactaaccccagggttggtcaatttcgtgccagccacaccctcgagctagcaaaaaaaaaaaaaaaaaaaaaaaaaaaaaagcatatgactaaaaaaaaaaaaaaaaaaaaaaaaaaaaaaaaaaaaaaaaaaaaaaaaaaaaaaaaaaaaaaaaaaaaaa

SEQ ID NO: 793 - RNA, 2057 nt, synthetic construct
  source 1..2057: mol_type = other RNA
agaataaactagtattcttctggtccccacagactcagagagaacccgccaccatggattggatttggagaatcctgttcctcgtgggcgccgctaccggagcccactcccaaggcagactgtttcagtctggcgccgaagtgaaaagaccaggcgcctctgtgcggatcagctgcagagctgacgacgacccctacaccgacgacgataccttcaccaagtactggacccactggatcagacaggcccctggacaaagacctgagtggctgggagtgatcagccctcacttcgccagacctatctacagctacaagttccgggacagactgaccctgaccagagacagctctctgaccgccgtgtacctggaactgaagggcctgcagcctgacgacagcggcatctacttttgcgccagagatcccttcggcgacagagcccctcactacaactaccacatggacgtgtggggcggaggcacagccgtgatagtgtcttccggcggaggtggaagtggtggtggcggtagcggaggcggtgggtccggaggtggtggatctgaagttgtgctgacacagagccctgccatcctgagtgtgtccccaggcgatagagtgatcctgtcctgcagagcctctcagggcctcgattcttctcacctggcctggtacagattcaagcggggacagatccccacactggtcatcttcggcaccagcaacagagccagaggcacccctgatagattttccggctctggcagcggagccgacttcaccctgacaatcagcagagtggaacccgaggacttcgccacctactactgccagagatacggcggcacccctatcacatttggcggcggaaccacactggacaagaaaggcggaggtggaagtggtggtggcggtagcggaggcggtgggtccggaggtggtggatctgaacctaagagcagcgacaagacccacacctgtcctccatgtcctgctccagaactgctcggcggaccttccgtgttcctgtttcctccaaagcctaaggacaccctgatgatcagcagaacccctgaagtgacctgcgtggtggtggatgtgtctcacgaggacccagaagtgaagttcaattggtacgtggacggcgtggaagtgcacaacgccaagaccaagcctagagaggaacagtacaacagcacctacagagtggtgtccgtgctgacagtgctgcaccaggattggctgaacggcaaagagtacaagtgcaaggtgtccaacaaggccctgcctgctcctatcgagaaaaccatcagcaaggccaagggccagcctcgcgaacctcaagtctgtacactgcctcctagccgcgaggaaatgaccaagaaccaggtgtccctgagctgcgccgtgaagggcttttacccttccgatatcgccgtggaatgggagagcaatggccagcctgagaacaactacaagacaacccctcctgtgctggacagcgacggctcattcttcctggtgtccaagctgacagtggacaagagcagatggcagcagggcaacgtgttcagctgcagcgtgctgcatgaagccctgcacagccactacacccagaagtccctgtctctgagccccggcaagtgataaggatccgatctggtactgcatgcacgcaatgctagctgcccctttcccgtcctgggtaccccgagtctcccccgacctcgggtcccaggtatgctcccacctccacctgccccactcaccacctctgctagttccagacacctcccaagcacgcagcaatgcagctcaaaacgcttagcctagccacacccccacgggaaacagcagtgattaacctttagcaataaacgaaagtttaactaagctatactaaccccagggttggtcaatttcgtgccagccacaccctcgagctagcaaaaaaaaaaaaaaaaaaaaaaaaaaaaaagcatatgactaaaaaaaaaaaaaaaaaaaaaaaaaaaaaaaaaaaaaaaaaaaaaaaaaaaaaaaaaaaaaaaaaaaaaa

SEQ ID NO: 794 - RNA, 2057 nt, synthetic construct
  source 1..2057: mol_type = other RNA
agaataaactagtattcttctggtccccacagactcagagagaacccgccaccatggattggatttggagaatcctgttcctcgtgggcgccgctaccggagcccactcccaaggcagactgtttcagtctggcgccgaagtgaaaagaccaggcgcctctgtgcggatcagctgcagagctgacgacgacccctacaccgacgacgataccttcaccaagtactggacccactggatcagacaggcccctggacaaagacctgagtggctgggagtgatcagccctcacttcgccagacctatctacagctacaagttccgggacagactgaccctgaccagagacagctctctgaccgccgtgtacctggaactgaagggcctgcagcctgacgacagcggcatctacttttgcgccagagatcccttcggcgacagagcccctcactacaactaccacatggacgtgtggggcggaggcacagccgtgatagtgtcttccggcggaggtggaagtggtggtggcggtagcggaggcggtgggtccggaggtggtggatctgaagttgtgctgacacagagccctgccatcctgagtgtgtccccaggcgatagagtgatcctgtcctgcagagcctctcagggcctcgattcttctcacctggcctggtacagattcaagcggggacagatccccacactggtcatcttcggcaccagcaacagagccagaggcacccctgatagattttccggctctggcagcggagccgacttcaccctgacaatcagcagagtggaacccgaggacttcgccacctactactgccagagatacggcggcacccctatcacatttggcggcggaaccacactggacaagaaaggcggaggtggaagtggtggtggcggtagcggaggcggtgggtccggaggtggtggatctgaacctaagagcagcgacaagacccacacctgtcctccatgtcctgctccagaactgctggccggaccttccgtgttcctgtttcctccaaagcctaaggacaccctgatgatcagcagaacccctgaagtgacctgcgtggtggtggatgtgtctcacgaggaccctgaagtgaagttcaattggtacgtggacggcgtggaagtgcacaacgccaagaccaagcctagagaggaacagtacaacagcacctacagagtggtgtccgtgctgaccgtgctgcaccaggattggctgaacggcaaagagtacaagtgcaaggtgtccaacaaggccctgcctctgcctgaggaaaagaccatcagcaaggccaagggccagcctcgcgaacctcaagtctgtacactgcctcctagccgcgaggaaatgaccaagaaccaggtgtccctgagctgcgccgtgaagggcttttacccttccgatatcgccgtggaatgggagagcaatggccagcctgagaacaactacaagacaacccctcctgtgctggacagcgacggctcattcttcctggtgtccaagctgacagtggacaagagcagatggcagcagggcaacgtgttcagctgcagcgtgctgcatgaagccctgcacagccactacacccagaagtccctgtctctgagccccggcaagtgataaggatccgatctggtactgcatgcacgcaatgctagctgcccctttcccgtcctgggtaccccgagtctcccccgacctcgggtcccaggtatgctcccacctccacctgccccactcaccacctctgctagttccagacacctcccaagcacgcagcaatgcagctcaaaacgcttagcctagccacacccccacgggaaacagcagtgattaacctttagcaataaacgaaagtttaactaagctatactaaccccagggttggtcaatttcgtgccagccacaccctcgagctagcaaaaaaaaaaaaaaaaaaaaaaaaaaaaaagcatatgactaaaaaaaaaaaaaaaaaaaaaaaaaaaaaaaaaaaaaaaaaaaaaaaaaaaaaaaaaaaaaaaaaaaaaa

SEQ ID NO: 795 - RNA, 2057 nt, synthetic construct
  source 1..2057: mol_type = other RNA
agaataaactagtattcttctggtccccacagactcagagagaacccgccaccatggattggatttggagaatcctgttcctcgtgggcgccgctaccggagcccactcccaaggcagactgtttcagtctggcgccgaagtgaaaagaccaggcgcctctgtgcggatcagctgcagagctgacgacgacccctacaccgacgacgataccttcaccaagtactggacccactggatcagacaggcccctggacaaagacctgagtggctgggagtgatcagccctcacttcgccagacctatctacagctacaagttccgggacagactgaccctgaccagagacagctctctgaccgccgtgtacctggaactgaagggcctgcagcctgacgacagcggcatctacttttgcgccagagatcccttcggcgacagagcccctcactacaactaccacatggacgtgtggggcggaggcacagccgtgatagtgtcttccggcggaggtggaagtggtggtggcggtagcggaggcggtgggtccggaggtggtggatctgaagttgtgctgacacagagccctgccatcctgagtgtgtccccaggcgatagagtgatcctgtcctgcagagcctctcagggcctcgattcttctcacctggcctggtacagattcaagcggggacagatccccacactggtcatcttcggcaccagcaacagagccagaggcacccctgatagattttccggctctggcagcggagccgacttcaccctgacaatcagcagagtggaacccgaggacttcgccacctactactgccagagatacggcggcacccctatcacatttggcggcggaaccacactggacaagaaaggcggaggtggaagtggtggtggcggtagcggaggcggtgggtccggaggtggtggatctgaacctaagagcagcgacaagacccacacctgtcctccatgtcctgctccagaactgctggccggaccttccgtgttcctgtttcctccaaagcctaaggacaccctgatgatcagcagaacccctgaagtgacctgcgtggtggtggatgtgtctcacgaggaccctgaagtgaagttcaattggtacgtggacggcgtggaagtgcacaacgccaagaccaagcctagagaggaacagtacaacagcacctacagagtggtgtccgtgctgaccgtgctgcaccaggattggctgaacggcaaagagtacaagtgcaaggtgtccaacaaggccctgcctgcccctgaggaaaagaccatcagcaaggccaagggccagcctcgcgaacctcaagtctgtacactgcctcctagccgcgaggaaatgaccaagaaccaggtgtccctgagctgcgccgtgaagggcttttacccttccgatatcgccgtggaatgggagagcaatggccagcctgagaacaactacaagacaacccctcctgtgctggacagcgacggctcattcttcctggtgtccaagctgacagtggacaagagcagatggcagcagggcaacgtgttcagctgcagcgtgctgcatgaagccctgcacagccactacacccagaagtccctgtctctgagccccggcaagtgataaggatccgatctggtactgcatgcacgcaatgctagctgcccctttcccgtcctgggtaccccgagtctcccccgacctcgggtcccaggtatgctcccacctccacctgccccactcaccacctctgctagttccagacacctcccaagcacgcagcaatgcagctcaaaacgcttagcctagccacacccccacgggaaacagcagtgattaacctttagcaataaacgaaagtttaactaagctatactaaccccagggttggtcaatttcgtgccagccacaccctcgagctagcaaaaaaaaaaaaaaaaaaaaaaaaaaaaaagcatatgactaaaaaaaaaaaaaaaaaaaaaaaaaaaaaaaaaaaaaaaaaaaaaaaaaaaaaaaaaaaaaaaaaaaaaa

SEQ ID NO: 796 - RNA, 2057 nt, synthetic construct
  source 1..2057: mol_type = other RNA
agaataaactagtattcttctggtccccacagactcagagagaacccgccaccatggattggatttggagaatcctgttcctcgtgggcgccgctaccggagcccactcccaaggcagactgtttcagtctggcgccgaagtgaaaagaccaggcgcctctgtgcggatcagctgcagagctgacgacgacccctacaccgacgacgataccttcaccaagtactggacccactggatcagacaggcccctggacaaagacctgagtggctgggagtgatcagccctcacttcgccagacctatctacagctacaagttccgggacagactgaccctgaccagagacagctctctgaccgccgtgtacctggaactgaagggcctgcagcctgacgacagcggcatctacttttgcgccagagatcccttcggcgacagagcccctcactacaactaccacatggacgtgtggggcggaggcacagccgtgatagtgtcttccggcggaggtggaagtggtggtggcggtagcggaggcggtgggtccggaggtggtggatctgaagttgtgctgacacagagccctgccatcctgagtgtgtccccaggcgatagagtgatcctgtcctgcagagcctctcagggcctcgattcttctcacctggcctggtacagattcaagcggggacagatccccacactggtcatcttcggcaccagcaacagagccagaggcacccctgatagattttccggctctggcagcggagccgacttcaccctgacaatcagcagagtggaacccgaggacttcgccacctactactgccagagatacggcggcacccctatcacatttggcggcggaaccacactggacaagaaaggcggaggtggaagtggtggtggcggtagcggaggcggtgggtccggaggtggtggatctgaacctaagagcagcgacaagacccacacctgtcctccatgtcctgctccagaactgctcggcggaccttccgtgttcctgtttcctccaaagcctaaggacaccctgatgatcagcagaacccctgaagtgacctgcgtggtggtggatgtgtctcacgaggacccagaagtgaagttcaattggtacgtggacggcgtggaagtgcacaacgccaagaccaagcctagagaggaacagtacaacagcacctacagagtggtgtccgtgctgacagtgctgcaccaggattggctgaacggcaaagagtacaagtgcaaggtgtccaacaaggccctgcctgctcctatcgagaaaaccatcagcaaggccaagggccagcctagggaaccccaggtttacaccctgcctccatgccgcgaggaaatgaccaagaaccaggtgtccctgtggtgcctggtcaagggcttctacccttccgatatcgccgtggaatgggagagcaatggccagcctgagaacaactacaagacaacccctcctgtgctggacagcgacggctcattcttcctgtacagcaagctgacagtggacaagagcagatggcagcagggcaacgtgttcagctgcagcgtgctgcatgaagccctgcacagccactacacccagaagtccctgtctctgagccccggcaagtgataaggatccgatctggtactgcatgcacgcaatgctagctgcccctttcccgtcctgggtaccccgagtctcccccgacctcgggtcccaggtatgctcccacctccacctgccccactcaccacctctgctagttccagacacctcccaagcacgcagcaatgcagctcaaaacgcttagcctagccacacccccacgggaaacagcagtgattaacctttagcaataaacgaaagtttaactaagctatactaaccccagggttggtcaatttcgtgccagccacaccctcgagctagcaaaaaaaaaaaaaaaaaaaaaaaaaaaaaagcatatgactaaaaaaaaaaaaaaaaaaaaaaaaaaaaaaaaaaaaaaaaaaaaaaaaaaaaaaaaaaaaaaaaaaaaaa

SEQ ID NO: 797 - RNA, 2057 nt, synthetic construct
  source 1..2057: mol_type = other RNA
agaataaactagtattcttctggtccccacagactcagagagaacccgccaccatggattggatttggagaatcctgttcctcgtgggcgccgctaccggagcccactcccaaggcagactgtttcagtctggcgccgaagtgaaaagaccaggcgcctctgtgcggatcagctgcagagctgacgacgacccctacaccgacgacgataccttcaccaagtactggacccactggatcagacaggcccctggacaaagacctgagtggctgggagtgatcagccctcacttcgccagacctatctacagctacaagttccgggacagactgaccctgaccagagacagctctctgaccgccgtgtacctggaactgaagggcctgcagcctgacgacagcggcatctacttttgcgccagagatcccttcggcgacagagcccctcactacaactaccacatggacgtgtggggcggaggcacagccgtgatagtgtcttccggcggaggtggaagtggtggtggcggtagcggaggcggtgggtccggaggtggtggatctgaagttgtgctgacacagagccctgccatcctgagtgtgtccccaggcgatagagtgatcctgtcctgcagagcctctcagggcctcgattcttctcacctggcctggtacagattcaagcggggacagatccccacactggtcatcttcggcaccagcaacagagccagaggcacccctgatagattttccggctctggcagcggagccgacttcaccctgacaatcagcagagtggaacccgaggacttcgccacctactactgccagagatacggcggcacccctatcacatttggcggcggaaccacactggacaagaaaggcggaggtggaagtggtggtggcggtagcggaggcggtgggtccggaggtggtggatctgaacctaagagcagcgacaagacccacacctgtcctccatgtcctgctccagaactgctggccggaccttccgtgttcctgtttcctccaaagcctaaggacaccctgatgatcagcagaacccctgaagtgacctgcgtggtggtggatgtgtctcacgaggaccctgaagtgaagttcaattggtacgtggacggcgtggaagtgcacaacgccaagaccaagcctagagaggaacagtacaacagcacctacagagtggtgtccgtgctgaccgtgctgcaccaggattggctgaacggcaaagagtacaagtgcaaggtgtccaacaaggccctgcctctgcctgaggaaaagaccatcagcaaggccaagggccagcctagggaaccccaggtttacaccctgcctccatgccgcgaggaaatgaccaagaaccaggtgtccctgtggtgcctggtcaagggcttctacccttccgatatcgccgtggaatgggagagcaatggccagcctgagaacaactacaagacaacccctcctgtgctggacagcgacggctcattcttcctgtacagcaagctgacagtggacaagagcagatggcagcagggcaacgtgttcagctgcagcgtgctgcatgaagccctgcacagccactacacccagaagtccctgtctctgagccccggcaagtgataaggatccgatctggtactgcatgcacgcaatgctagctgcccctttcccgtcctgggtaccccgagtctcccccgacctcgggtcccaggtatgctcccacctccacctgccccactcaccacctctgctagttccagacacctcccaagcacgcagcaatgcagctcaaaacgcttagcctagccacacccccacgggaaacagcagtgattaacctttagcaataaacgaaagtttaactaagctatactaaccccagggttggtcaatttcgtgccagccacaccctcgagctagcaaaaaaaaaaaaaaaaaaaaaaaaaaaaaagcatatgactaaaaaaaaaaaaaaaaaaaaaaaaaaaaaaaaaaaaaaaaaaaaaaaaaaaaaaaaaaaaaaaaaaaaaa

SEQ ID NO: 798 - RNA, 2057 nt, synthetic construct
  source 1..2057: mol_type = other RNA
agaataaactagtattcttctggtccccacagactcagagagaacccgccaccatggattggatttggagaatcctgttcctcgtgggcgccgctaccggagcccactcccaaggcagactgtttcagtctggcgccgaagtgaaaagaccaggcgcctctgtgcggatcagctgcagagctgacgacgacccctacaccgacgacgataccttcaccaagtactggacccactggatcagacaggcccctggacaaagacctgagtggctgggagtgatcagccctcacttcgccagacctatctacagctacaagttccgggacagactgaccctgaccagagacagctctctgaccgccgtgtacctggaactgaagggcctgcagcctgacgacagcggcatctacttttgcgccagagatcccttcggcgacagagcccctcactacaactaccacatggacgtgtggggcggaggcacagccgtgatagtgtcttccggcggaggtggaagtggtggtggcggtagcggaggcggtgggtccggaggtggtggatctgaagttgtgctgacacagagccctgccatcctgagtgtgtccccaggcgatagagtgatcctgtcctgcagagcctctcagggcctcgattcttctcacctggcctggtacagattcaagcggggacagatccccacactggtcatcttcggcaccagcaacagagccagaggcacccctgatagattttccggctctggcagcggagccgacttcaccctgacaatcagcagagtggaacccgaggacttcgccacctactactgccagagatacggcggcacccctatcacatttggcggcggaaccacactggacaagaaaggcggaggtggaagtggtggtggcggtagcggaggcggtgggtccggaggtggtggatctgaacctaagagcagcgacaagacccacacctgtcctccatgtcctgctccagaactgctggccggaccttccgtgttcctgtttcctccaaagcctaaggacaccctgatgatcagcagaacccctgaagtgacctgcgtggtggtggatgtgtctcacgaggaccctgaagtgaagttcaattggtacgtggacggcgtggaagtgcacaacgccaagaccaagcctagagaggaacagtacaacagcacctacagagtggtgtccgtgctgaccgtgctgcaccaggattggctgaacggcaaagagtacaagtgcaaggtgtccaacaaggccctgcctgcccctgaggaaaagaccatcagcaaggccaagggccagcctagggaaccccaggtttacaccctgcctccatgccgcgaggaaatgaccaagaaccaggtgtccctgtggtgcctggtcaagggcttctacccttccgatatcgccgtggaatgggagagcaatggccagcctgagaacaactacaagacaacccctcctgtgctggacagcgacggctcattcttcctgtacagcaagctgacagtggacaagagcagatggcagcagggcaacgtgttcagctgcagcgtgctgcatgaagccctgcacagccactacacccagaagtccctgtctctgagccccggcaagtgataaggatccgatctggtactgcatgcacgcaatgctagctgcccctttcccgtcctgggtaccccgagtctcccccgacctcgggtcccaggtatgctcccacctccacctgccccactcaccacctctgctagttccagacacctcccaagcacgcagcaatgcagctcaaaacgcttagcctagccacacccccacgggaaacagcagtgattaacctttagcaataaacgaaagtttaactaagctatactaaccccagggttggtcaatttcgtgccagccacaccctcgagctagcaaaaaaaaaaaaaaaaaaaaaaaaaaaaaagcatatgactaaaaaaaaaaaaaaaaaaaaaaaaaaaaaaaaaaaaaaaaaaaaaaaaaaaaaaaaaaaaaaaaaaaaaa

SEQ ID NO: 799 - RNA, 2057 nt, synthetic construct; identical to SEQ ID NO: 793
  source 1..2057: mol_type = other RNA

SEQ ID NO: 800 - RNA, 2057 nt, synthetic construct; identical to SEQ ID NO: 794
  source 1..2057: mol_type = other RNA

SEQ ID NO: 801 - RNA, 2057 nt, synthetic construct; identical to SEQ ID NO: 795
  source 1..2057: mol_type = other RNA

SEQ ID NO: 802 - RNA, 2057 nt, synthetic construct; identical to SEQ ID NO: 796
  source 1..2057: mol_type = other RNA

SEQ ID NO: 803 - RNA, 2057 nt, synthetic construct; identical to SEQ ID NO: 797
  source 1..2057: mol_type = other RNA

SEQ ID NO: 804 - RNA, 2057 nt, synthetic construct; identical to SEQ ID NO: 798
  source 1..2057: mol_type = other RNA

SEQ ID NO: 805 - RNA, 2057 nt, synthetic construct
  source 1..2057: mol_type = other RNA
agaataaactagtattcttctggtccccacagactcagagagaacccgccaccatggattggatttggagaatcctgttcctcgtgggcgccgctaccggagcccactcccaaggcagactgtttcagtctggcgccgaagtgaaaagaccaggcgcctctgtgcggatcagctgcagagctgacgacgacccctacaccgacgacgataccttcaccaagtactggacccactggatcagacaggcccctggacaaagacctgagtggctgggagtgatcagccctcacttcgccagacctatctacagctacaagttccgggacagactgaccctgaccagagacagctctctgaccgccgtgtacctggaactgaagggcctgcagcctgacgacagcggcatctacttttgcgccagagatcccttcggcgacagagcccctcactacaactaccacatggacgtgtggggcggaggcacagccgtgatagtgtcttccggcggaggtggaagtggtggtggcggtagcggaggcggtgggtccggaggtggtggatctgaagttgtgctgacacagagccctgccatcctgagtgtgtccccaggcgatagagtgatcctgtcctgcagagcctctcagggcctcgattcttctcacctggcctggtacagattcaagcggggacagatccccacactggtcatcttcggcaccagcaacagagccagaggcacccctgatagattttccggctctggcagcggagccgacttcaccctgacaatcagcagagtggaacccgaggacttcgccacctactactgccagagatacggcggcacccctatcacatttggcggcggaaccacactggacaagaaaggcggaggtggaagtggtggtggcggtagcggaggcggtgggtccggaggtggtggatctgaacctaagagcagcgacaagacccacacctgtcctccatgtcctgctccagaactgctcggcggaccttccgtgttcctgtttcctccaaagcctaaggacaccctgatgatcagcagaacccctgaagtgacctgcgtggtggtggatgtgtctcacgaggacccagaagtgaagttcaattggtacgtggacggcgtggaagtgcacaacgccaagaccaagcctagagaggaacagtacaacagcacctacagagtggtgtccgtgctgacagtgctgcaccaggattggctgaacggcaaagagtacaagtgcaaggtgtccaacaaggccctgcctgctcctatcgagaaaaccatcagcaaggccaagggccagcctcgcgaacctcaagtctgtacactgcctcctagccgcgacgaactgaccaagaaccaggtgtccctgagctgcgccgtgaagggcttttacccttccgatatcgccgtggaatgggagagcaatggccagcctgagaacaactacaagacaacccctcctgtgctggacagcgacggctcattcttcctggtgtccaagctgacagtggacaagagcagatggcagcagggcaacgtgttcagctgcagcgtgctgcatgaagccctgcacagccactacacccagaagtccctgtctctgagccccggcaagtgataaggatccgatctggtactgcatgcacgcaatgctagctgcccctttcccgtcctgggtaccccgagtctcccccgacctcgggtcccaggtatgctcccacctccacctgccccactcaccacctctgctagttccagacacctcccaagcacgcagcaatgcagctcaaaacgcttagcctagccacacccccacgggaaacagcagtgattaacctttagcaataaacgaaagtttaactaagctatactaaccccagggttggtcaatttcgtgccagccacaccctcgagctagcaaaaaaaaaaaaaaaaaaaaaaaaaaaaaagcatatgactaaaaaaaaaaaaaaaaaaaaaaaaaaaaaaaaaaaaaaaaaaaaaaaaaaaaaaaaaaaaaaaaaaaaaa

SEQ ID NO: 806 - RNA, 2057 nt, synthetic construct
  source 1..2057: mol_type = other RNA
agaataaactagtattcttctggtccccacagactcagagagaacccgccaccatggattggatttggagaatcctgttcctcgtgggcgccgctaccggagcccactcccaaggcagactgtttcagtctggcgccgaagtgaaaagaccaggcgcctctgtgcggatcagctgcagagctgacgacgacccctacaccgacgacgataccttcaccaagtactggacccactggatcagacaggcccctggacaaagacctgagtggctgggagtgatcagccctcacttcgccagacctatctacagctacaagttccgggacagactgaccctgaccagagacagctctctgaccgccgtgtacctggaactgaagggcctgcagcctgacgacagcggcatctacttttgcgccagagatcccttcggcgacagagcccctcactacaactaccacatggacgtgtggggcggaggcacagccgtgatagtgtcttccggcggaggtggaagtggtggtggcggtagcggaggcggtgggtccggaggtggtggatctgaagttgtgctgacacagagccctgccatcctgagtgtgtccccaggcgatagagtgatcctgtcctgcagagcctctcagggcctcgattcttctcacctggcctggtacagattcaagcggggacagatccccacactggtcatcttcggcaccagcaacagagccagaggcacccctgatagattttccggctctggcagcggagccgacttcaccctgacaatcagcagagtggaacccgaggacttcgccacctactactgccagagatacggcggcacccctatcacatttggcggcggaaccacactggacaagaaaggcggaggtggaagtggtggtggcggtagcggaggcggtgggtccggaggtggtggatctgaacctaagagcagcgacaagacccacacctgtcctccatgtcctgctccagaactgctggccggaccttccgtgttcctgtttcctccaaagcctaaggacaccctgatgatcagcagaacccctgaagtgacctgcgtggtggtggatgtgtctcacgaggaccctgaagtgaagttcaattggtacgtggacggcgtggaagtgcacaacgccaagaccaagcctagagaggaacagtacaacagcacctacagagtggtgtccgtgctgaccgtgctgcaccaggattggctgaacggcaaagagtacaagtgcaaggtgtccaacaaggccctgcctctgcctgaggaaaagaccatcagcaaggccaagggccagcctcgcgaacctcaagtctgtacactgcctcctagccgcgacgaactgaccaagaaccaggtgtccctgagctgcgccgtgaagggcttttacccttccgatatcgccgtggaatgggagagcaatggccagcctgagaacaactacaagacaacccctcctgtgctggacagcgacggctcattcttcctggtgtccaagctgacagtggacaagagcagatggcagcagggcaacgtgttcagctgcagcgtgctgcatgaagccctgcacagccactacacccagaagtccctgtctctgagccccggcaagtgataaggatccgatctggtactgcatgcacgcaatgctagctgcccctttcccgtcctgggtaccccgagtctcccccgacctcgggtcccaggtatgctcccacctccacctgccccactcaccacctctgctagttccagacacctcccaagcacgcagcaatgcagctcaaaacgcttagcctagccacacccccacgggaaacagcagtgattaacctttagcaataaacgaaagtttaactaagctatactaaccccagggttggtcaatttcgtgccagccacaccctcgagctagcaaaaaaaaaaaaaaaaaaaaaaaaaaaaaagcatatgactaaaaaaaaaaaaaaaaaaaaaaaaaaaaaaaaaaaaaaaaaaaaaaaaaaaaaaaaaaaaaaaaaaaaaa

SEQ ID NO: 807 - RNA, 2057 nt, synthetic construct
  source 1..2057: mol_type = other RNA
agaataaactagtattcttctggtccccacagactcagagagaacccgccaccatggattggatttggagaatcctgttcctcgtgggcgccgctaccggagcccactcccaaggcagactgtttcagtctggcgccgaagtgaaaagaccaggcgcctctgtgcggatcagctgcagagctgacgacgacccctacaccgacgacgataccttcaccaagtactggacccactggatcagacaggcccctggacaaagacctgagtggctgggagtgatcagccctcacttcgccagacctatctacagctacaagttccgggacagactgaccctgaccagagacagctctctgaccgccgtgtacctggaactgaagggcctgcagcctgacgacagcggcatctacttttgcgccagagatcccttcggcgacagagcccctcactacaactaccacatggacgtgtggggcggaggcacagccgtgatagtgtcttccggcggaggtggaagtggtggtggcggtagcggaggcggtgggtccggaggtggtggatctgaagttgtgctgacacagagccctgccatcctgagtgtgtccccaggcgatagagtgatcctgtcctgcagagcctctcagggcctcgattcttctcacctggcctggtacagattcaagcggggacagatccccacactggtcatcttcggcaccagcaacagagccagaggcacccctgatagattttccggctctggcagcggagccgacttcaccctgacaatcagcagagtggaacccgaggacttcgccacctactactgccagagatacggcggcacccctatcacatttggcggcggaaccacactggacaagaaaggcggaggtggaagtggtggtggcggtagcggaggcggtgggtccggaggtggtggatctgaacctaagagcagcgacaagacccacacctgtcctccatgtcctgctccagaactgctggccggaccttccgtgttcctgtttcctccaaagcctaaggacaccctgatgatcagcagaacccctgaagtgacctgcgtggtggtggatgtgtctcacgaggaccctgaagtgaagttcaattggtacgtggacggcgtggaagtgcacaacgccaagaccaagcctagagaggaacagtacaacagcacctacagagtggtgtccgtgctgaccgtgctgcaccaggattggctgaacggcaaagagtacaagtgcaaggtgtccaacaaggccctgcctgcccctgaggaaaagaccatcagcaaggccaagggccagcctcgcgaacctcaagtctgtacactgcctcctagccgcgacgaactgaccaagaaccaggtgtccctgagctgcgccgtgaagggcttttacccttccgatatcgccgtggaatgggagagcaatggccagcctgagaacaactacaagacaacccctcctgtgctggacagcgacggctcattcttcctggtgtccaagctgacagtggacaagagcagatggcagcagggcaacgtgttcagctgcagcgtgctgcatgaagccctgcacagccactacacccagaagtccctgtctctgagccccggcaagtgataaggatccgatctggtactgcatgcacgcaatgctagctgcccctttcccgtcctgggtaccccgagtctcccccgacctcgggtcccaggtatgctcccacctccacctgccccactcaccacctctgctagttccagacacctcccaagcacgcagcaatgcagctcaaaacgcttagcctagccacacccccacgggaaacagcagtgattaacctttagcaataaacgaaagtttaactaagctatactaaccccagggttggtcaatttcgtgccagccacaccctcgagctagcaaaaaaaaaaaaaaaaaaaaaaaaaaaaaagcatatgactaaaaaaaaaaaaaaaaaaaaaaaaaaaaaaaaaaaaaaaaaaaaaaaaaaaaaaaaaaaaaaaaaaaaaa

SEQ ID NO: 808 - RNA, 2057 nt, synthetic construct
  source 1..2057: mol_type = other RNA
agaataaactagtattcttctggtccccacagactcagagagaacccgccaccatggattggatttggagaatcctgttcctcgtgggcgccgctaccggagcccactcccaaggcagactgtttcagtctggcgccgaagtgaaaagaccaggcgcctctgtgcggatcagctgcagagctgacgacgacccctacaccgacgacgataccttcaccaagtactggacccactggatcagacaggcccctggacaaagacctgagtggctgggagtgatcagccctcacttcgccagacctatctacagctacaagttccgggacagactgaccctgaccagagacagctctctgaccgccgtgtacctggaactgaagggcctgcagcctgacgacagcggcatctacttttgcgccagagatcccttcggcgacagagcccctcactacaactaccacatggacgtgtggggcggaggcacagccgtgatagtgtcttccggcggaggtggaagtggtggtggcggtagcggaggcggtgggtccggaggtggtggatctgaagttgtgctgacacagagccctgccatcctgagtgtgtccccaggcgatagagtgatcctgtcctgcagagcctctcagggcctcgattcttctcacctggcctggtacagattcaagcggggacagatccccacactggtcatcttcggcaccagcaacagagccagaggcacccctgatagattttccggctctggcagcggagccgacttcaccctgacaatcagcagagtggaacccgaggacttcgccacctactactgccagagatacggcggcacccctatcacatttggcggcggaaccacactggacaagaaaggcggaggtggaagtggtggtggcggtagcggaggcggtgggtccggaggtggtggatctgaacctaagagcagcgacaagacccacacctgtcctccatgtcctgctccagaactgctcggcggaccttccgtgttcctgtttcctccaaagcctaaggacaccctgatgatcagcagaacccctgaagtgacctgcgtggtggtggatgtgtctcacgaggacccagaagtgaagttcaattggtacgtggacggcgtggaagtgcacaacgccaagaccaagcctagagaggaacagtacaacagcacctacagagtggtgtccgtgctgacagtgctgcaccaggattggctgaacggcaaagagtacaagtgcaaggtgtccaacaaggccctgcctgctcctatcgagaaaaccatcagcaaggccaagggccagcctagggaaccccaggtttacaccctgcctccatgccgcgacgaactgaccaagaaccaggtgtccctgtggtgcctggtcaagggcttctacccttccgatatcgccgtggaatgggagagcaatggccagcctgagaacaactacaagacaacccctcctgtgctggacagcgacggctcattcttcctgtacagcaagctgacagtggacaagagcagatggcagcagggcaacgtgttcagctgcagcgtgctgcatgaagccctgcacagccactacacccagaagtccctgtctctgagccccggcaagtgataaggatccgatctggtactgcatgcacgcaatgctagctgcccctttcccgtcctgggtaccccgagtctcccccgacctcgggtcccaggtatgctcccacctccacctgccccactcaccacctctgctagttccagacacctcccaagcacgcagcaatgcagctcaaaacgcttagcctagccacacccccacgggaaacagcagtgattaacctttagcaataaacgaaagtttaactaagctatactaaccccagggttggtcaatttcgtgccagccacaccctcgagctagcaaaaaaaaaaaaaaaaaaaaaaaaaaaaaagcatatgactaaaaaaaaaaaaaaaaaaaaaaaaaaaaaaaaaaaaaaaaaaaaaaaaaaaaaaaaaaaaaaaaaaaaaa

SEQ ID NO: 809 - RNA, 2057 nt, synthetic construct
  source 1..2057: mol_type = other RNA
agaataaactagtattcttctggtccccacagactcagagagaacccgccaccatggattggatttggagaatcctgttcctcgtgggcgccgctaccggagcccactcccaaggcagactgtttcagtctggcgccgaagtgaaaagaccaggcgcctctgtgcggatcagctgcagagctgacgacgacccctacaccgacgacgataccttcaccaagtactggacccactggatcagacaggcccctggacaaagacctgagtggctgggagtgatcagccctcacttcgccagacctatctacagctacaagttccgggacagactgaccctgaccagagacagctctctgaccgccgtgtacctggaactgaagggcctgcagcctgacgacagcggcatctacttttgcgccagagatcccttcggcgacagagcccctcactacaactaccacatggacgtgtggggcggaggcacagccgtgatagtgtcttccggcggaggtggaagtggtggtggcggtagcggaggcggtgggtccggaggtggtggatctgaagttgtgctgacacagagccctgccatcctgagtgtgtccccaggcgatagagtgatcctgtcctgcagagcctctcagggcctcgattcttctcacctggcctggtacagattcaagcggggacagatccccacactggtcatcttcggcaccagcaacagagccagaggcacccctgatagattttccggctctggcagcggagccgacttcaccctgacaatcagcagagtggaacccgaggacttcgccacctactactgccagagatacggcggcacccctatcacatttggcggcggaaccacactggacaagaaaggcggaggtggaagtggtggtggcggtagcggaggcggtgggtccggaggtggtggatctgaacctaagagcagcgacaagacccacacctgtcctccatgtcctgctccagaactgctggccggaccttccgtgttcctgtttcctccaaagcctaaggacaccctgatgatcagcagaacccctgaagtgacctgcgtggtggtggatgtgtctcacgaggaccctgaagtgaagttcaattggtacgtggacggcgtggaagtgcacaacgccaagaccaagcctagagaggaacagtacaacagcacctacagagtggtgtccgtgctgaccgtgctgcaccaggattggctgaacggcaaagagtacaagtgcaaggtgtccaacaaggccctgcctctgcctgaggaaaagaccatcagcaaggccaagggccagcctagggaaccccaggtttacaccctgcctccatgccgcgacgaactgaccaagaaccaggtgtccctgtggtgcctggtcaagggcttctacccttccgatatcgccgtggaatgggagagcaatggccagcctgagaacaactacaagacaacccctcctgtgctggacagcgacggctcattcttcctgtacagcaagctgacagtggacaagagcagatggcagcagggcaacgtgttcagctgcagcgtgctgcatgaagccctgcacagccactacacccagaagtccctgtctctgagccccggcaagtgataaggatccgatctggtactgcatgcacgcaatgctagctgcccctttcccgtcctgggtaccccgagtctcccccgacctcgggtcccaggtatgctcccacctccacctgccccactcaccacctctgctagttccagacacctcccaagcacgcagcaatgcagctcaaaacgcttagcctagccacacccccacgggaaacagcagtgattaacctttagcaataaacgaaagtttaactaagctatactaaccccagggttggtcaatttcgtgccagccacaccctcgagctagcaaaaaaaaaaaaaaaaaaaaaaaaaaaaaagcatatgactaaaaaaaaaaaaaaaaaaaaaaaaaaaaaaaaaaaaaaaaaaaaaaaaaaaaaaaaaaaaaaaaaaaaaa

SEQ ID NO: 810 - RNA, 2057 nt, synthetic construct
  source 1..2057: mol_type = other RNA
agaataaactagtattcttctggtccccacagactcagagagaacccgccaccatggattggatttggagaatcctgttcctcgtgggcgccgctaccggagcccactcccaaggcagactgtttcagtctggcgccgaagtgaaaagaccaggcgcctctgtgcggatcagctgcagagctgacgacgacccctacaccgacgacgataccttcaccaagtactggacccactggatcagacaggcccctggacaaagacctgagtggctgggagtgatcagccctcacttcgccagacctatctacagctacaagttccgggacagactgaccctgaccagagacagctctctgaccgccgtgtacctggaactgaagggcctgcagcctgacgacagcggcatctacttttgcgccagagatcccttcggcgacagagcccctcactacaactaccacatggacgtgtggggcggaggcacagccgtgatagtgtcttccggcggaggtggaagtggtggtggcggtagcggaggcggtgggtccggaggtggtggatctgaagttgtgctgacacagagccctgccatcctgagtgtgtccccaggcgatagagtgatcctgtcctgcagagcctctcagggcctcgattcttctcacctggcctggtacagattcaagcggggacagatccccacactggtcatcttcggcaccagcaacagagccagaggcacccctgatagattttccggctctggcagcggagccgacttcaccctgacaatcagcagagtggaacccgaggacttcgccacctactactgccagagatacggcggcacccctatcacatttggcggcggaaccacactggacaagaaaggcggaggtggaagtggtggtggcggtagcggaggcggtgggtccggaggtggtggatctgaacctaagagcagcgacaagacccacacctgtcctccatgtcctgctccagaactgctggccggaccttccgtgttcctgtttcctccaaagcctaaggacaccctgatgatcagcagaacccctgaagtgacctgcgtggtggtggatgtgtctcacgaggaccctgaagtgaagttcaattggtacgtggacggcgtggaagtgcacaacgccaagaccaagcctagagaggaacagtacaacagcacctacagagtggtgtccgtgctgaccgtgctgcaccaggattggctgaacggcaaagagtacaagtgcaaggtgtccaacaaggccctgcctgcccctgaggaaaagaccatcagcaaggccaagggccagcctagggaaccccaggtttacaccctgcctccatgccgcgacgaactgaccaagaaccaggtgtccctgtggtgcctggtcaagggcttctacccttccgatatcgccgtggaatgggagagcaatggccagcctgagaacaactacaagacaacccctcctgtgctggacagcgacggctcattcttcctgtacagcaagctgacagtggacaagagcagatggcagcagggcaacgtgttcagctgcagcgtgctgcatgaagccctgcacagccactacacccagaagtccctgtctctgagccccggcaagtgataaggatccgatctggtactgcatgcacgcaatgctagctgcccctttcccgtcctgggtaccccgagtctcccccgacctcgggtcccaggtatgctcccacctccacctgccccactcaccacctctgctagttccagacacctcccaagcacgcagcaatgcagctcaaaacgcttagcctagccacacccccacgggaaacagcagtgattaacctttagcaataaacgaaagtttaactaagctatactaaccccagggttggtcaatttcgtgccagccacaccctcgagctagcaaaaaaaaaaaaaaaaaaaaaaaaaaaaaagcatatgactaaaaaaaaaaaaaaaaaaaaaaaaaaaaaaaaaaaaaaaaaaaaaaaaaaaaaaaaaaaaaaaaaaaaaa

SEQ ID NO: 811 - RNA, 2057 nt, synthetic construct
  source 1..2057: mol_type = other RNA
agaataaactagtattcttctggtccccacagactcagagagaacccgccaccatggattggatttggagaatcctgttcctcgtgggcgccgctaccggagcccactccgaagtggtgctgacacagagccccgccatcctgagtgttagccctggcgatagagtgatcctgagctgcagagcctctcagggcctcgattcttctcacctggcctggtacagattcaagcggggacagatccccacactggtcatcttcggcaccagcaacagagccagaggcacccctgatagattttccggctctggcagcggagccgacttcaccctgacaatcagcagagtggaacccgaggacttcgccacctactactgccagagatacggcggcacccctatcacatttggcggcggaaccacactggacaagaaaggcggaggtggaagtggtggtggcggtagcggaggcggtgggtccggaggtggtggatctcaaggcagactgtttcagtctggcgccgaagtgaaaagaccaggcgcctctgtgcggatcagctgtagagccgacgacgacccctacaccgacgatgacaccttcaccaagtactggacccactggatcagacaggcccctggacaaagacctgagtggctgggagtgatcagccctcacttcgccagacctatctacagctacaagttccgggacagactgaccctgaccagagacagctctctgaccgccgtgtacctggaactgaagggcctgcagcctgacgacagcggcatctacttttgcgccagagatcccttcggcgacagggctccccactacaactaccacatggatgtgtggggaggcggcacagccgtgattgtgtcttccggcggcggaggaagcggaggcggaggttctggtggcggaggctcaggcggtggcggatctgaacctaagagcagcgacaagacccacacctgtcctccatgtcctgctccagaactgctcggcggaccttccgtgttcctgtttcctccaaagcctaaggacaccctgatgatcagcagaacccctgaagtgacctgcgtggtggtggatgtgtctcacgaggacccagaagtgaagttcaattggtacgtggacggcgtggaagtgcacaacgccaagaccaagcctagagaggaacagtacaacagcacctacagagtggtgtccgtgctgacagtgctgcaccaggattggctgaacggcaaagagtacaagtgcaaggtgtccaacaaggccctgcctgctcctatcgagaaaaccatcagcaaggccaagggccagcctcgcgaacctcaagtctgtacactgcctcctagccgcgaggaaatgaccaagaaccaggtgtccctgagctgcgccgtgaagggcttttacccttccgatatcgccgtggaatgggagagcaatggccagcctgagaacaactacaagacaacccctcctgtgctggacagcgacggctcattcttcctggtgtccaagctgacagtggacaagagcagatggcagcagggcaacgtgttcagctgcagcgtgctgcatgaagccctgcacagccactacacccagaagtccctgtctctgagccccggcaagtgataaggatccgatctggtactgcatgcacgcaatgctagctgcccctttcccgtcctgggtaccccgagtctcccccgacctcgggtcccaggtatgctcccacctccacctgccccactcaccacctctgctagttccagacacctcccaagcacgcagcaatgcagctcaaaacgcttagcctagccacacccccacgggaaacagcagtgattaacctttagcaataaacgaaagtttaactaagctatactaaccccagggttggtcaatttcgtgccagccacaccctcgagctagcaaaaaaaaaaaaaaaaaaaaaaaaaaaaaagcatatgactaaaaaaaaaaaaaaaaaaaaaaaaaaaaaaaaaaaaaaaaaaaaaaaaaaaaaaaaaaaaaaaaaaaaaa

SEQ ID NO: 812 - RNA, 2057 nt, synthetic construct
  source 1..2057: mol_type = other RNA
agaataaactagtattcttctggtccccacagactcagagagaacccgccaccatggattggatttggagaatcctgttcctcgtgggcgccgctaccggagcccactccgaagtggtgctgacacagagccccgccatcctgagtgttagccctggcgatagagtgatcctgagctgcagagcctctcagggcctcgattcttctcacctggcctggtacagattcaagcggggacagatccccacactggtcatcttcggcaccagcaacagagccagaggcacccctgatagattttccggctctggcagcggagccgacttcaccctgacaatcagcagagtggaacccgaggacttcgccacctactactgccagagatacggcggcacccctatcacatttggcggcggaaccacactggacaagaaaggcggaggtggaagtggtggtggcggtagcggaggcggtgggtccggaggtggtggatctcaaggcagactgtttcagtctggcgccgaagtgaaaagaccaggcgcctctgtgcggatcagctgtagagccgacgacgacccctacaccgacgatgacaccttcaccaagtactggacccactggatcagacaggcccctggacaaagacctgagtggctgggagtgatcagccctcacttcgccagacctatctacagctacaagttccgggacagactgaccctgaccagagacagctctctgaccgccgtgtacctggaactgaagggcctgcagcctgacgacagcggcatctacttttgcgccagagatcccttcggcgacagggctccccactacaactaccacatggatgtgtggggaggcggcacagccgtgattgtgtcttccggcggcggaggaagcggaggcggaggttctggtggcggaggctcaggcggtggcggatctgaacctaagagcagcgacaagacccacacctgtcctccatgtcctgctccagaactgctggccggaccttccgtgttcctgtttcctccaaagcctaaggacaccctgatgatcagcagaacccctgaagtgacctgcgtggtggtggatgtgtctcacgaggaccctgaagtgaagttcaattggtacgtggacggcgtggaagtgcacaacgccaagaccaagcctagagaggaacagtacaacagcacctacagagtggtgtccgtgctgaccgtgctgcaccaggattggctgaacggcaaagagtacaagtgcaaggtgtccaacaaggccctgcctctgcctgaggaaaagaccatcagcaaggccaagggccagcctcgcgaacctcaagtctgtacactgcctcctagccgcgaggaaatgaccaagaaccaggtgtccctgagctgcgccgtgaagggcttttacccttccgatatcgccgtggaatgggagagcaatggccagcctgagaacaactacaagacaacccctcctgtgctggacagcgacggctcattcttcctggtgtccaagctgacagtggacaagagcagatggcagcagggcaacgtgttcagctgcagcgtgctgcatgaagccctgcacagccactacacccagaagtccctgtctctgagccccggcaagtgataaggatccgatctggtactgcatgcacgcaatgctagctgcccctttcccgtcctgggtaccccgagtctcccccgacctcgggtcccaggtatgctcccacctccacctgccccactcaccacctctgctagttccagacacctcccaagcacgcagcaatgcagctcaaaacgcttagcctagccacacccccacgggaaacagcagtgattaacctttagcaataaacgaaagtttaactaagctatactaaccccagggttggtcaatttcgtgccagccacaccctcgagctagcaaaaaaaaaaaaaaaaaaaaaaaaaaaaaagcatatgactaaaaaaaaaaaaaaaaaaaaaaaaaaaaaaaaaaaaaaaaaaaaaaaaaaaaaaaaaaaaaaaaaaaaaa

SEQ ID NO: 813 - RNA, 2057 nt, synthetic construct
  source 1..2057: mol_type = other RNA
agaataaactagtattcttctggtccccacagactcagagagaacccgccaccatggattggatttggagaatcctgttcctcgtgggcgccgctaccggagcccactccgaagtggtgctgacacagagccccgccatcctgagtgttagccctggcgatagagtgatcctgagctgcagagcctctcagggcctcgattcttctcacctggcctggtacagattcaagcggggacagatccccacactggtcatcttcggcaccagcaacagagccagaggcacccctgatagattttccggctctggcagcggagccgacttcaccctgacaatcagcagagtggaacccgaggacttcgccacctactactgccagagatacggcggcacccctatcacatttggcggcggaaccacactggacaagaaaggcggaggtggaagtggtggtggcggtagcggaggcggtgggtccggaggtggtggatctcaaggcagactgtttcagtctggcgccgaagtgaaaagaccaggcgcctctgtgcggatcagctgtagagccgacgacgacccctacaccgacgatgacaccttcaccaagtactggacccactggatcagacaggcccctggacaaagacctgagtggctgggagtgatcagccctcacttcgccagacctatctacagctacaagttccgggacagactgaccctgaccagagacagctctctgaccgccgtgtacctggaactgaagggcctgcagcctgacgacagcggcatctacttttgcgccagagatcccttcggcgacagggctccccactacaactaccacatggatgtgtggggaggcggcacagccgtgattgtgtcttccggcggcggaggaagcggaggcggaggttctggtggcggaggctcaggcggtggcggatctgaacctaagagcagcgacaagacccacacctgtcctccatgtcctgctccagaactgctggccggaccttccgtgttcctgtttcctccaaagcctaaggacaccctgatgatcagcagaacccctgaagtgacctgcgtggtggtggatgtgtctcacgaggaccctgaagtgaagttcaattggtacgtggacggcgtggaagtgcacaacgccaagaccaagcctagagaggaacagtacaacagcacctacagagtggtgtccgtgctgaccgtgctgcaccaggattggctgaacggcaaagagtacaagtgcaaggtgtccaacaaggccctgcctgcccctgaggaaaagaccatcagcaaggccaagggccagcctcgcgaacctcaagtctgtacactgcctcctagccgcgaggaaatgaccaagaaccaggtgtccctgagctgcgccgtgaagggcttttacccttccgatatcgccgtggaatgggagagcaatggccagcctgagaacaactacaagacaacccctcctgtgctggacagcgacggctcattcttcctggtgtccaagctgacagtggacaagagcagatggcagcagggcaacgtgttcagctgcagcgtgctgcatgaagccctgcacagccactacacccagaagtccctgtctctgagccccggcaagtgataaggatccgatctggtactgcatgcacgcaatgctagctgcccctttcccgtcctgggtaccccgagtctcccccgacctcgggtcccaggtatgctcccacctccacctgccccactcaccacctctgctagttccagacacctcccaagcacgcagcaatgcagctcaaaacgcttagcctagccacacccccacgggaaacagcagtgattaacctttagcaataaacgaaagtttaactaagctatactaaccccagggttggtcaatttcgtgccagccacaccctcgagctagcaaaaaaaaaaaaaaaaaaaaaaaaaaaaaagcatatgactaaaaaaaaaaaaaaaaaaaaaaaaaaaaaaaaaaaaaaaaaaaaaaaaaaaaaaaaaaaaaaaaaaaaaa

SEQ ID NO: 814 - RNA, 2057 nt, synthetic construct
  source 1..2057: mol_type = other RNA
agaataaactagtattcttctggtccccacagactcagagagaacccgccaccatggattggatttggagaatcctgttcctcgtgggcgccgctaccggagcccactccgaagtggtgctgacacagagccccgccatcctgagtgttagccctggcgatagagtgatcctgagctgcagagcctctcagggcctcgattcttctcacctggcctggtacagattcaagcggggacagatccccacactggtcatcttcggcaccagcaacagagccagaggcacccctgatagattttccggctctggcagcggagccgacttcaccctgacaatcagcagagtggaacccgaggacttcgccacctactactgccagagatacggcggcacccctatcacatttggcggcggaaccacactggacaagaaaggcggaggtggaagtggtggtggcggtagcggaggcggtgggtccggaggtggtggatctcaaggcagactgtttcagtctggcgccgaagtgaaaagaccaggcgcctctgtgcggatcagctgtagagccgacgacgacccctacaccgacgatgacaccttcaccaagtactggacccactggatcagacaggcccctggacaaagacctgagtggctgggagtgatcagccctcacttcgccagacctatctacagctacaagttccgggacagactgaccctgaccagagacagctctctgaccgccgtgtacctggaactgaagggcctgcagcctgacgacagcggcatctacttttgcgccagagatcccttcggcgacagggctccccactacaactaccacatggatgtgtggggaggcggcacagccgtgattgtgtcttccggcggcggaggaagcggaggcggaggttctggtggcggaggctcaggcggtggcggatctgaacctaagagcagcgacaagacccacacctgtcctccatgtcctgctccagaactgctcggcggaccttccgtgttcctgtttcctccaaagcctaaggacaccctgatgatcagcagaacccctgaagtgacctgcgtggtggtggatgtgtctcacgaggacccagaagtgaagttcaattggtacgtggacggcgtggaagtgcacaacgccaagaccaagcctagagaggaacagtacaacagcacctacagagtggtgtccgtgctgacagtgctgcaccaggattggctgaacggcaaagagtacaagtgcaaggtgtccaacaaggccctgcctgctcctatcgagaaaaccatcagcaaggccaagggccagcctagggaaccccaggtttacaccctgcctccatgccgcgaggaaatgaccaagaaccaggtgtccctgtggtgcctggtcaagggcttctacccttccgatatcgccgtggaatgggagagcaatggccagcctgagaacaactacaagacaacccctcctgtgctggacagcgacggctcattcttcctgtacagcaagctgacagtggacaagagcagatggcagcagggcaacgtgttcagctgcagcgtgctgcatgaagccctgcacagccactacacccagaagtccctgtctctgagccccggcaagtgataaggatccgatctggtactgcatgcacgcaatgctagctgcccctttcccgtcctgggtaccccgagtctcccccgacctcgggtcccaggtatgctcccacctccacctgccccactcaccacctctgctagttccagacacctcccaagcacgcagcaatgcagctcaaaacgcttagcctagccacacccccacgggaaacagcagtgattaacctttagcaataaacgaaagtttaactaagctatactaaccccagggttggtcaatttcgtgccagccacaccctcgagctagcaaaaaaaaaaaaaaaaaaaaaaaaaaaaaagcatatgactaaaaaaaaaaaaaaaaaaaaaaaaaaaaaaaaaaaaaaaaaaaaaaaaaaaaaaaaaaaaaaaaaaaaaa

SEQ ID NO: 815 - RNA, 2057 nt, synthetic construct
  source 1..2057: mol_type = other RNA
agaataaactagtattcttctggtccccacagactcagagagaacccgccaccatggattggatttggagaatcctgttcctcgtgggcgccgctaccggagcccactccgaagtggtgctgacacagagccccgccatcctgagtgttagccctggcgatagagtgatcctgagctgcagagcctctcagggcctcgattcttctcacctggcctggtacagattcaagcggggacagatccccacactggtcatcttcggcaccagcaacagagccagaggcacccctgatagattttccggctctggcagcggagccgacttcaccctgacaatcagcagagtggaacccgaggacttcgccacctactactgccagagatacggcggcacccctatcacatttggcggcggaaccacactggacaagaaaggcggaggtggaagtggtggtggcggtagcggaggcggtgggtccggaggtggtggatctcaaggcagactgtttcagtctggcgccgaagtgaaaagaccaggcgcctctgtgcggatcagctgtagagccgacgacgacccctacaccgacgatgacaccttcaccaagtactggacccactggatcagacaggcccctggacaaagacctgagtggctgggagtgatcagccctcacttcgccagacctatctacagctacaagttccgggacagactgaccctgaccagagacagctctctgaccgccgtgtacctggaactgaagggcctgcagcctgacgacagcggcatctacttttgcgccagagatcccttcggcgacagggctccccactacaactaccacatggatgtgtggggaggcggcacagccgtgattgtgtcttccggcggcggaggaagcggaggcggaggttctggtggcggaggctcaggcggtggcggatctgaacctaagagcagcgacaagacccacacctgtcctccatgtcctgctccagaactgctggccggaccttccgtgttcctgtttcctccaaagcctaaggacaccctgatgatcagcagaacccctgaagtgacctgcgtggtggtggatgtgtctcacgaggaccctgaagtgaagttcaattggtacgtggacggcgtggaagtgcacaacgccaagaccaagcctagagaggaacagtacaacagcacctacagagtggtgtccgtgctgaccgtgctgcaccaggattggctgaacggcaaagagtacaagtgcaaggtgtccaacaaggccctgcctctgcctgaggaaaagaccatcagcaaggccaagggccagcctagggaaccccaggtttacaccctgcctccatgccgcgaggaaatgaccaagaaccaggtgtccctgtggtgcctggtcaagggcttctacccttccgatatcgccgtggaatgggagagcaatggccagcctgagaacaactacaagacaacccctcctgtgctggacagcgacggctcattcttcctgtacagcaagctgacagtggacaagagcagatggcagcagggcaacgtgttcagctgcagcgtgctgcatgaagccctgcacagccactacacccagaagtccctgtctctgagccccggcaagtgataaggatccgatctggtactgcatgcacgcaatgctagctgcccctttcccgtcctgggtaccccgagtctcccccgacctcgggtcccaggtatgctcccacctccacctgccccactcaccacctctgctagttccagacacctcccaagcacgcagcaatgcagctcaaaacgcttagcctagccacacccccacgggaaacagcagtgattaacctttagcaataaacgaaagtttaactaagctatactaaccccagggttggtcaatttcgtgccagccacaccctcgagctagcaaaaaaaaaaaaaaaaaaaaaaaaaaaaaagcatatgactaaaaaaaaaaaaaaaaaaaaaaaaaaaaaaaaaaaaaaaaaaaaaaaaaaaaaaaaaaaaaaaaaaaaaa

SEQ ID NO: 816 - RNA, 2057 nt, synthetic construct
  source 1..2057: mol_type = other RNA
agaataaactagtattcttctggtccccacagactcagagagaacccgccaccatggattggatttggagaatcctgttcctcgtgggcgccgctaccggagcccactccgaagtggtgctgacacagagccccgccatcctgagtgttagccctggcgatagagtgatcctgagctgcagagcctctcagggcctcgattcttctcacctggcctggtacagattcaagcggggacagatccccacactggtcatcttcggcaccagcaacagagccagaggcacccctgatagattttccggctctggcagcggagccgacttcaccctgacaatcagcagagtggaacccgaggacttcgccacctactactgccagagatacggcggcacccctatcacatttggcggcggaaccacactggacaagaaaggcggaggtggaagtggtggtggcggtagcggaggcggtgggtccggaggtggtggatctcaaggcagactgtttcagtctggcgccgaagtgaaaagaccaggcgcctctgtgcggatcagctgtagagccgacgacgacccctacaccgacgatgacaccttcaccaagtactggacccactggatcagacaggcccctggacaaagacctgagtggctgggagtgatcagccctcacttcgccagacctatctacagctacaagttccgggacagactgaccctgaccagagacagctctctgaccgccgtgtacctggaactgaagggcctgcagcctgacgacagcggcatctacttttgcgccagagatcccttcggcgacagggctccccactacaactaccacatggatgtgtggggaggcggcacagccgtgattgtgtcttccggcggcggaggaagcggaggcggaggttctggtggcggaggctcaggcggtggcggatctgaacctaagagcagcgacaagacccacacctgtcctccatgtcctgctccagaactgctggccggaccttccgtgttcctgtttcctccaaagcctaaggacaccctgatgatcagcagaacccctgaagtgacctgcgtggtggtggatgtgtctcacgaggaccctgaagtgaagttcaattggtacgtggacggcgtggaagtgcacaacgccaagaccaagcctagagaggaacagtacaacagcacctacagagtggtgtccgtgctgaccgtgctgcaccaggattggctgaacggcaaagagtacaagtgcaaggtgtccaacaaggccctgcctgcccctgaggaaaagaccatcagcaaggccaagggccagcctagggaaccccaggtttacaccctgcctccatgccgcgaggaaatgaccaagaaccaggtgtccctgtggtgcctggtcaagggcttctacccttccgatatcgccgtggaatgggagagcaatggccagcctgagaacaactacaagacaacccctcctgtgctggacagcgacggctcattcttcctgtacagcaagctgacagtggacaagagcagatggcagcagggcaacgtgttcagctgcagcgtgctgcatgaagccctgcacagccactacacccagaagtccctgtctctgagccccggcaagtgataaggatccgatctggtactgcatgcacgcaatgctagctgcccctttcccgtcctgggtaccccgagtctcccccgacctcgggtcccaggtatgctcccacctccacctgccccactcaccacctctgctagttccagacacctcccaagcacgcagcaatgcagctcaaaacgcttagcctagccacacccccacgggaaacagcagtgattaacctttagcaataaacgaaagtttaactaagctatactaaccccagggttggtcaatttcgtgccagccacaccctcgagctagcaaaaaaaaaaaaaaaaaaaaaaaaaaaaaagcatatgactaaaaaaaaaaaaaaaaaaaaaaaaaaaaaaaaaaaaaaaaaaaaaaaaaaaaaaaaaaaaaaaaaaaaaa

SEQ ID NO: 817 - RNA, 2057 nt, synthetic construct; identical to SEQ ID NO: 811
  source 1..2057: mol_type = other RNA

SEQ ID NO: 818 - RNA, 2057 nt, synthetic construct; identical to SEQ ID NO: 812
  source 1..2057: mol_type = other RNA

SEQ ID NO: 819 - RNA, 2057 nt, synthetic construct; identical to SEQ ID NO: 813
  source 1..2057: mol_type = other RNA

SEQ ID NO: 820 - RNA, 2057 nt, synthetic construct; identical to SEQ ID NO: 814
  source 1..2057: mol_type = other RNA

SEQ ID NO: 821 - RNA, 2057 nt, synthetic construct; identical to SEQ ID NO: 815
  source 1..2057: mol_type = other RNA

SEQ ID NO: 822 - RNA, 2057 nt, synthetic construct; identical to SEQ ID NO: 816
  source 1..2057: mol_type = other RNA

SEQ ID NO: 823 - RNA, 2057 nt, synthetic construct
  source 1..2057: mol_type = other RNA
agaataaactagtattcttctggtccccacagactcagagagaacccgccaccatggattggatttggagaatcctgttcctcgtgggcgccgctaccggagcccactccgaagtggtgctgacacagagccccgccatcctgagtgttagccctggcgatagagtgatcctgagctgcagagcctctcagggcctcgattcttctcacctggcctggtacagattcaagcggggacagatccccacactggtcatcttcggcaccagcaacagagccagaggcacccctgatagattttccggctctggcagcggagccgacttcaccctgacaatcagcagagtggaacccgaggacttcgccacctactactgccagagatacggcggcacccctatcacatttggcggcggaaccacactggacaagaaaggcggaggtggaagtggtggtggcggtagcggaggcggtgggtccggaggtggtggatctcaaggcagactgtttcagtctggcgccgaagtgaaaagaccaggcgcctctgtgcggatcagctgtagagccgacgacgacccctacaccgacgatgacaccttcaccaagtactggacccactggatcagacaggcccctggacaaagacctgagtggctgggagtgatcagccctcacttcgccagacctatctacagctacaagttccgggacagactgaccctgaccagagacagctctctgaccgccgtgtacctggaactgaagggcctgcagcctgacgacagcggcatctacttttgcgccagagatcccttcggcgacagggctccccactacaactaccacatggatgtgtggggaggcggcacagccgtgattgtgtcttccggcggcggaggaagcggaggcggaggttctggtggcggaggctcaggcggtggcggatctgaacctaagagcagcgacaagacccacacctgtcctccatgtcctgctccagaactgctcggcggaccttccgtgttcctgtttcctccaaagcctaaggacaccctgatgatcagcagaacccctgaagtgacctgcgtggtggtggatgtgtctcacgaggacccagaagtgaagttcaattggtacgtggacggcgtggaagtgcacaacgccaagaccaagcctagagaggaacagtacaacagcacctacagagtggtgtccgtgctgacagtgctgcaccaggattggctgaacggcaaagagtacaagtgcaaggtgtccaacaaggccctgcctgctcctatcgagaaaaccatcagcaaggccaagggccagcctcgcgaacctcaagtctgtacactgcctcctagccgcgacgaactgaccaagaaccaggtgtccctgagctgcgccgtgaagggcttttacccttccgatatcgccgtggaatgggagagcaatggccagcctgagaacaactacaagacaacccctcctgtgctggacagcgacggctcattcttcctggtgtccaagctgacagtggacaagagcagatggcagcagggcaacgtgttcagctgcagcgtgctgcatgaagccctgcacagccactacacccagaagtccctgtctctgagccccggcaagtgataaggatccgatctggtactgcatgcacgcaatgctagctgcccctttcccgtcctgggtaccccgagtctcccccgacctcgggtcccaggtatgctcccacctccacctgccccactcaccacctctgctagttccagacacctcccaagcacgcagcaatgcagctcaaaacgcttagcctagccacacccccacgggaaacagcagtgattaacctttagcaataaacgaaagtttaactaagctatactaaccccagggttggtcaatttcgtgccagccacaccctcgagctagcaaaaaaaaaaaaaaaaaaaaaaaaaaaaaagcatatgactaaaaaaaaaaaaaaaaaaaaaaaaaaaaaaaaaaaaaaaaaaaaaaaaaaaaaaaaaaaaaaaaaaaaaa

SEQ ID NO: 824 - RNA, 2057 nt, synthetic construct
  source 1..2057: mol_type = other RNA
agaataaactagtattcttctggtccccacagactcagagagaacccgccaccatggattggatttggagaatcctgttcctcgtgggcgccgctaccggagcccactccgaagtggtgctgacacagagccccgccatcctgagtgttagccctggcgatagagtgatcctgagctgcagagcctctcagggcctcgattcttctcacctggcctggtacagattcaagcggggacagatccccacactggtcatcttcggcaccagcaacagagccagaggcacccctgatagattttccggctctggcagcggagccgacttcaccctgacaatcagcagagtggaacccgaggacttcgccacctactactgccagagatacggcggcacccctatcacatttggcggcggaaccacactggacaagaaaggcggaggtggaagtggtggtggcggtagcggaggcggtgggtccggaggtggtggatctcaaggcagactgtttcagtctggcgccgaagtgaaaagaccaggcgcctctgtgcggatcagctgtagagccgacgacgacccctacaccgacgatgacaccttcaccaagtactggacccactggatcagacaggcccctggacaaagacctgagtggctgggagtgatcagccctcacttcgccagacctatctacagctacaagttccgggacagactgaccctgaccagagacagctctctgaccgccgtgtacctggaactgaagggcctgcagcctgacgacagcggcatctacttttgcgccagagatcccttcggcgacagggctccccactacaactaccacatggatgtgtggggaggcggcacagccgtgattgtgtcttccggcggcggaggaagcggaggcggaggttctggtggcggaggctcaggcggtggcggatctgaacctaagagcagcgacaagacccacacctgtcctccatgtcctgctccagaactgctggccggaccttccgtgttcctgtttcctccaaagcctaaggacaccctgatgatcagcagaacccctgaagtgacctgcgtggtggtggatgtgtctcacgaggaccctgaagtgaagttcaattggtacgtggacggcgtggaagtgcacaacgccaagaccaagcctagagaggaacagtacaacagcacctacagagtggtgtccgtgctgaccgtgctgcaccaggattggctgaacggcaaagagtacaagtgcaaggtgtccaacaaggccctgcctctgcctgaggaaaagaccatcagcaaggccaagggccagcctcgcgaacctcaagtctgtacactgcctcctagccgcgacgaactgaccaagaaccaggtgtccctgagctgcgccgtgaagggcttttacccttccgatatcgccgtggaatgggagagcaatggccagcctgagaacaactacaagacaacccctcctgtgctggacagcgacggctcattcttcctggtgtccaagctgacagtggacaagagcagatggcagcagggcaacgtgttcagctgcagcgtgctgcatgaagccctgcacagccactacacccagaagtccctgtctctgagccccggcaagtgataaggatccgatctggtactgcatgcacgcaatgctagctgcccctttcccgtcctgggtaccccgagtctcccccgacctcgggtcccaggtatgctcccacctccacctgccccactcaccacctctgctagttccagacacctcccaagcacgcagcaatgcagctcaaaacgcttagcctagccacacccccacgggaaacagcagtgattaacctttagcaataaacgaaagtttaactaagctatactaaccccagggttggtcaatttcgtgccagccacaccctcgagctagcaaaaaaaaaaaaaaaaaaaaaaaaaaaaaagcatatgactaaaaaaaaaaaaaaaaaaaaaaaaaaaaaaaaaaaaaaaaaaaaaaaaaaaaaaaaaaaaaaaaaaaaaa

SEQ ID NO: 825 - RNA, 2057 nt, synthetic construct
  source 1..2057: mol_type = other RNA
agaataaactagtattcttctggtccccacagactcagagagaacccgccaccatggattggatttggagaatcctgttcctcgtgggcgccgctaccggagcccactccgaagtggtgctgacacagagccccgccatcctgagtgttagccctggcgatagagtgatcctgagctgcagagcctctcagggcctcgattcttctcacctggcctggtacagattcaagcggggacagatccccacactggtcatcttcggcaccagcaacagagccagaggcacccctgatagattttccggctctggcagcggagccgacttcaccctgacaatcagcagagtggaacccgaggacttcgccacctactactgccagagatacggcggcacccctatcacatttggcggcggaaccacactggacaagaaaggcggaggtggaagtggtggtggcggtagcggaggcggtgggtccggaggtggtggatctcaaggcagactgtttcagtctggcgccgaagtgaaaagaccaggcgcctctgtgcggatcagctgtagagccgacgacgacccctacaccgacgatgacaccttcaccaagtactggacccactggatcagacaggcccctggacaaagacctgagtggctgggagtgatcagccctcacttcgccagacctatctacagctacaagttccgggacagactgaccctgaccagagacagctctctgaccgccgtgtacctggaactgaagggcctgcagcctgacgacagcggcatctacttttgcgccagagatcccttcggcgacagggctccccactacaactaccacatggatgtgtggggaggcggcacagccgtgattgtgtcttccggcggcggaggaagcggaggcggaggttctggtggcggaggctcaggcggtggcggatctgaacctaagagcagcgacaagacccacacctgtcctccatgtcctgctccagaactgctggccggaccttccgtgttcctgtttcctccaaagcctaaggacaccctgatgatcagcagaacccctgaagtgacctgcgtggtggtggatgtgtctcacgaggaccctgaagtgaagttcaattggtacgtggacggcgtggaagtgcacaacgccaagaccaagcctagagaggaacagtacaacagcacctacagagtggtgtccgtgctgaccgtgctgcaccaggattggctgaacggcaaagagtacaagtgcaaggtgtccaacaaggccctgcctgcccctgaggaaaagaccatcagcaaggccaagggccagcctcgcgaacctcaagtctgtacactgcctcctagccgcgacgaactgaccaagaaccaggtgtccctgagctgcgccgtgaagggcttttacccttccgatatcgccgtggaatgggagagcaatggccagcctgagaacaactacaagacaacccctcctgtgctggacagcgacggctcattcttcctggtgtccaagctgacagtggacaagagcagatggcagcagggcaacgtgttcagctgcagcgtgctgcatgaagccctgcacagccactacacccagaagtccctgtctctgagccccggcaagtgataaggatccgatctggtactgcatgcacgcaatgctagctgcccctttcccgtcctgggtaccccgagtctcccccgacctcgggtcccaggtatgctcccacctccacctgccccactcaccacctctgctagttccagacacctcccaagcacgcagcaatgcagctcaaaacgcttagcctagccacacccccacgggaaacagcagtgattaacctttagcaataaacgaaagtttaactaagctatactaaccccagggttggtcaatttcgtgccagccacaccctcgagctagcaaaaaaaaaaaaaaaaaaaaaaaaaaaaaagcatatgactaaaaaaaaaaaaaaaaaaaaaaaaaaaaaaaaaaaaaaaaaaaaaaaaaaaaaaaaaaaaaaaaaaaaaa

SEQ ID NO: 826 - RNA, 2057 nt, synthetic construct
  source 1..2057: mol_type = other RNA
agaataaactagtattcttctggtccccacagactcagagagaacccgccaccatggattggatttggagaatcctgttcctcgtgggcgccgctaccggagcccactccgaagtggtgctgacacagagccccgccatcctgagtgttagccctggcgatagagtgatcctgagctgcagagcctctcagggcctcgattcttctcacctggcctggtacagattcaagcggggacagatccccacactggtcatcttcggcaccagcaacagagccagaggcacccctgatagattttccggctctggcagcggagccgacttcaccctgacaatcagcagagtggaacccgaggacttcgccacctactactgccagagatacggcggcacccctatcacatttggcggcggaaccacactggacaagaaaggcggaggtggaagtggtggtggcggtagcggaggcggtgggtccggaggtggtggatctcaaggcagactgtttcagtctggcgccgaagtgaaaagaccaggcgcctctgtgcggatcagctgtagagccgacgacgacccctacaccgacgatgacaccttcaccaagtactggacccactggatcagacaggcccctggacaaagacctgagtggctgggagtgatcagccctcacttcgccagacctatctacagctacaagttccgggacagactgaccctgaccagagacagctctctgaccgccgtgtacctggaactgaagggcctgcagcctgacgacagcggcatctacttttgcgccagagatcccttcggcgacagggctccccactacaactaccacatggatgtgtggggaggcggcacagccgtgattgtgtcttccggcggcggaggaagcggaggcggaggttctggtggcggaggctcaggcggtggcggatctgaacctaagagcagcgacaagacccacacctgtcctccatgtcctgctccagaactgctcggcggaccttccgtgttcctgtttcctccaaagcctaaggacaccctgatgatcagcagaacccctgaagtgacctgcgtggtggtggatgtgtctcacgaggacccagaagtgaagttcaattggtacgtggacggcgtggaagtgcacaacgccaagaccaagcctagagaggaacagtacaacagcacctacagagtggtgtccgtgctgacagtgctgcaccaggattggctgaacggcaaagagtacaagtgcaaggtgtccaacaaggccctgcctgctcctatcgagaaaaccatcagcaaggccaagggccagcctagggaaccccaggtttacaccctgcctccatgccgcgacgaactgaccaagaaccaggtgtccctgtggtgcctggtcaagggcttctacccttccgatatcgccgtggaatgggagagcaatggccagcctgagaacaactacaagacaacccctcctgtgctggacagcgacggctcattcttcctgtacagcaagctgacagtggacaagagcagatggcagcagggcaacgtgttcagctgcagcgtgctgcatgaagccctgcacagccactacacccagaagtccctgtctctgagccccggcaagtgataaggatccgatctggtactgcatgcacgcaatgctagctgcccctttcccgtcctgggtaccccgagtctcccccgacctcgggtcccaggtatgctcccacctccacctgccccactcaccacctctgctagttccagacacctcccaagcacgcagcaatgcagctcaaaacgcttagcctagccacacccccacgggaaacagcagtgattaacctttagcaataaacgaaagtttaactaagctatactaaccccagggttggtcaatttcgtgccagccacaccctcgagctagcaaaaaaaaaaaaaaaaaaaaaaaaaaaaaagcatatgactaaaaaaaaaaaaaaaaaaaaaaaaaaaaaaaaaaaaaaaaaaaaaaaaaaaaaaaaaaaaaaaaaaaaaa

SEQ ID NO: 827 - RNA, 2057 nt, synthetic construct
  source 1..2057: mol_type = other RNA
agaataaactagtattcttctggtccccacagactcagagagaacccgccaccatggattggatttggagaatcctgttcctcgtgggcgccgctaccggagcccactccgaagtggtgctgacacagagccccgccatcctgagtgttagccctggcgatagagtgatcctgagctgcagagcctctcagggcctcgattcttctcacctggcctggtacagattcaagcggggacagatccccacactggtcatcttcggcaccagcaacagagccagaggcacccctgatagattttccggctctggcagcggagccgacttcaccctgacaatcagcagagtggaacccgaggacttcgccacctactactgccagagatacggcggcacccctatcacatttggcggcggaaccacactggacaagaaaggcggaggtggaagtggtggtggcggtagcggaggcggtgggtccggaggtggtggatctcaaggcagactgtttcagtctggcgccgaagtgaaaagaccaggcgcctctgtgcggatcagctgtagagccgacgacgacccctacaccgacgatgacaccttcaccaagtactggacccactggatcagacaggcccctggacaaagacctgagtggctgggagtgatcagccctcacttcgccagacctatctacagctacaagttccgggacagactgaccctgaccagagacagctctctgaccgccgtgtacctggaactgaagggcctgcagcctgacgacagcggcatctacttttgcgccagagatcccttcggcgacagggctccccactacaactaccacatggatgtgtggggaggcggcacagccgtgattgtgtcttccggcggcggaggaagcggaggcggaggttctggtggcggaggctcaggcggtggcggatctgaacctaagagcagcgacaagacccacacctgtcctccatgtcctgctccagaactgctggccggaccttccgtgttcctgtttcctccaaagcctaaggacaccctgatgatcagcagaacccctgaagtgacctgcgtggtggtggatgtgtctcacgaggaccctgaagtgaagttcaattggtacgtggacggcgtggaagtgcacaacgccaagaccaagcctagagaggaacagtacaacagcacctacagagtggtgtccgtgctgaccgtgctgcaccaggattggctgaacggcaaagagtacaagtgcaaggtgtccaacaaggccctgcctctgcctgaggaaaagaccatcagcaaggccaagggccagcctagggaaccccaggtttacaccctgcctccatgccgcgacgaactgaccaagaaccaggtgtccctgtggtgcctggtcaagggcttctacccttccgatatcgccgtggaatgggagagcaatggccagcctgagaacaactacaagacaacccctcctgtgctggacagcgacggctcattcttcctgtacagcaagctgacagtggacaagagcagatggcagcagggcaacgtgttcagctgcagcgtgctgcatgaagccctgcacagccactacacccagaagtccctgtctctgagccccggcaagtgataaggatccgatctggtactgcatgcacgcaatgctagctgcccctttcccgtcctgggtaccccgagtctcccccgacctcgggtcccaggtatgctcccacctccacctgccccactcaccacctctgctagttccagacacctcccaagcacgcagcaatgcagctcaaaacgcttagcctagccacacccccacgggaaacagcagtgattaacctttagcaataaacgaaagtttaactaagctatactaaccccagggttggtcaatttcgtgccagccacaccctcgagctagcaaaaaaaaaaaaaaaaaaaaaaaaaaaaaagcatatgactaaaaaaaaaaaaaaaaaaaaaaaaaaaaaaaaaaaaaaaaaaaaaaaaaaaaaaaaaaaaaaaaaaaaaa

SEQ ID NO: 828 - RNA, 2057 nt, synthetic construct
  source 1..2057: mol_type = other RNA
agaataaactagtattcttctggtccccacagactcagagagaacccgccaccatggattggatttggagaatcctgttcctcgtgggcgccgctaccggagcccactccgaagtggtgctgacacagagccccgccatcctgagtgttagccctggcgatagagtgatcctgagctgcagagcctctcagggcctcgattcttctcacctggcctggtacagattcaagcggggacagatccccacactggtcatcttcggcaccagcaacagagccagaggcacccctgatagattttccggctctggcagcggagccgacttcaccctgacaatcagcagagtggaacccgaggacttcgccacctactactgccagagatacggcggcacccctatcacatttggcggcggaaccacactggacaagaaaggcggaggtggaagtggtggtggcggtagcggaggcggtgggtccggaggtggtggatctcaaggcagactgtttcagtctggcgccgaagtgaaaagaccaggcgcctctgtgcggatcagctgtagagccgacgacgacccctacaccgacgatgacaccttcaccaagtactggacccactggatcagacaggcccctggacaaagacctgagtggctgggagtgatcagccctcacttcgccagacctatctacagctacaagttccgggacagactgaccctgaccagagacagctctctgaccgccgtgtacctggaactgaagggcctgcagcctgacgacagcggcatctacttttgcgccagagatcccttcggcgacagggctccccactacaactaccacatggatgtgtggggaggcggcacagccgtgattgtgtcttccggcggcggaggaagcggaggcggaggttctggtggcggaggctcaggcggtggcggatctgaacctaagagcagcgacaagacccacacctgtcctccatgtcctgctccagaactgctggccggaccttccgtgttcctgtttcctccaaagcctaaggacaccctgatgatcagcagaacccctgaagtgacctgcgtggtggtggatgtgtctcacgaggaccctgaagtgaagttcaattggtacgtggacggcgtggaagtgcacaacgccaagaccaagcctagagaggaacagtacaacagcacctacagagtggtgtccgtgctgaccgtgctgcaccaggattggctgaacggcaaagagtacaagtgcaaggtgtccaacaaggccctgcctgcccctgaggaaaagaccatcagcaaggccaagggccagcctagggaaccccaggtttacaccctgcctccatgccgcgacgaactgaccaagaaccaggtgtccctgtggtgcctggtcaagggcttctacccttccgatatcgccgtggaatgggagagcaatggccagcctgagaacaactacaagacaacccctcctgtgctggacagcgacggctcattcttcctgtacagcaagctgacagtggacaagagcagatggcagcagggcaacgtgttcagctgcagcgtgctgcatgaagccctgcacagccactacacccagaagtccctgtctctgagccccggcaagtgataaggatccgatctggtactgcatgcacgcaatgctagctgcccctttcccgtcctgggtaccccgagtctcccccgacctcgggtcccaggtatgctcccacctccacctgccccactcaccacctctgctagttccagacacctcccaagcacgcagcaatgcagctcaaaacgcttagcctagccacacccccacgggaaacagcagtgattaacctttagcaataaacgaaagtttaactaagctatactaaccccagggttggtcaatttcgtgccagccacaccctcgagctagcaaaaaaaaaaaaaaaaaaaaaaaaaaaaaagcatatgactaaaaaaaaaaaaaaaaaaaaaaaaaaaaaaaaaaaaaaaaaaaaaaaaaaaaaaaaaaaaaaaaaaaaaa

SEQ ID NO: 829 - RNA, 2072 nt, synthetic construct
  source 1..2072: mol_type = other RNA
agaataaactagtattcttctggtccccacagactcagagagaacccgccaccatggattggatttggagaatcctgttcctcgtgggcgccgctaccggagcccactcccaaggcagactgtttcagtctggcgccgaagtgaaaagaccaggcgcctctgtgcggatcagctgcagagctgacgacgacccctacaccgacgacgataccttcaccaagtactggacccactggatcagacaggcccctggacaaagacctgagtggctgggagtgatcagccctcacttcgccagacctatctacagctacaagttccgggacagactgaccctgaccagagacagctctctgaccgccgtgtacctggaactgaagggcctgcagcctgacgacagcggcatctacttttgcgccagagatcccttcggcgacagagcccctcactacaactaccacatggacgtgtggggcggaggcacagccgtgatagtgtcttccggcggcggaggaagcggaggcgggggttctggcggtggtggctctggtggcggaggctcaggcggtggcggatctgaagttgtgctgacacagagccctgccatcctgagtgtgtccccaggcgatagagtgatcctgtcctgcagagcctctcagggcctcgattcttctcacctggcctggtacagattcaagcggggacagatccccacactggtcatcttcggcaccagcaacagagccagaggcacccctgatagattttccggctctggcagcggagccgacttcaccctgacaatcagcagagtggaacccgaggacttcgccacctactactgccagagatacggcggcacccctatcacatttggcggcggaaccacactggacaagaaaggcggaggtggaagtggtggtggcggtagcggaggcggtgggtccggaggtggtggatctgaacctaagagcagcgacaagacccacacctgtcctccatgtcctgctccagaactgctcggcggaccttccgtgttcctgtttcctccaaagcctaaggacaccctgatgatcagcagaacccctgaagtgacctgcgtggtggtggatgtgtctcacgaggacccagaagtgaagttcaattggtacgtggacggcgtggaagtgcacaacgccaagaccaagcctagagaggaacagtacaacagcacctacagagtggtgtccgtgctgacagtgctgcaccaggattggctgaacggcaaagagtacaagtgcaaggtgtccaacaaggccctgcctgctcctatcgagaaaaccatcagcaaggccaagggccagcctcgcgaacctcaagtctgtacactgcctcctagccgcgaggaaatgaccaagaaccaggtgtccctgagctgcgccgtgaagggcttttacccttccgatatcgccgtggaatgggagagcaatggccagcctgagaacaactacaagacaacccctcctgtgctggacagcgacggctcattcttcctggtgtccaagctgacagtggacaagagcagatggcagcagggcaacgtgttcagctgcagcgtgctgcatgaagccctgcacagccactacacccagaagtccctgtctctgagccccggcaagtgataaggatccgatctggtactgcatgcacgcaatgctagctgcccctttcccgtcctgggtaccccgagtctcccccgacctcgggtcccaggtatgctcccacctccacctgccccactcaccacctctgctagttccagacacctcccaagcacgcagcaatgcagctcaaaacgcttagcctagccacacccccacgggaaacagcagtgattaacctttagcaataaacgaaagtttaactaagctatactaaccccagggttggtcaatttcgtgccagccacaccctcgagctagcaaaaaaaaaaaaaaaaaaaaaaaaaaaaaagcatatgactaaaaaaaaaaaaaaaaaaaaaaaaaaaaaaaaaaaaaaaaaaaaaaaaaaaaaaaaaaaaaaaaaaaaaa

SEQ ID NO: 830 - RNA, 2072 nt, synthetic construct
  source 1..2072: mol_type = other RNA
agaataaactagtattcttctggtccccacagactcagagagaacccgccaccatggattggatttggagaatcctgttcctcgtgggcgccgctaccggagcccactcccaaggcagactgtttcagtctggcgccgaagtgaaaagaccaggcgcctctgtgcggatcagctgcagagctgacgacgacccctacaccgacgacgataccttcaccaagtactggacccactggatcagacaggcccctggacaaagacctgagtggctgggagtgatcagccctcacttcgccagacctatctacagctacaagttccgggacagactgaccctgaccagagacagctctctgaccgccgtgtacctggaactgaagggcctgcagcctgacgacagcggcatctacttttgcgccagagatcccttcggcgacagagcccctcactacaactaccacatggacgtgtggggcggaggcacagccgtgatagtgtcttccggcggcggaggaagcggaggcgggggttctggcggtggtggctctggtggcggaggctcaggcggtggcggatctgaagttgtgctgacacagagccctgccatcctgagtgtgtccccaggcgatagagtgatcctgtcctgcagagcctctcagggcctcgattcttctcacctggcctggtacagattcaagcggggacagatccccacactggtcatcttcggcaccagcaacagagccagaggcacccctgatagattttccggctctggcagcggagccgacttcaccctgacaatcagcagagtggaacccgaggacttcgccacctactactgccagagatacggcggcacccctatcacatttggcggcggaaccacactggacaagaaaggcggaggtggaagtggtggtggcggtagcggaggcggtgggtccggaggtggtggatctgaacctaagagcagcgacaagacccacacctgtcctccatgtcctgctccagaactgctggccggaccttccgtgttcctgtttcctccaaagcctaaggacaccctgatgatcagcagaacccctgaagtgacctgcgtggtggtggatgtgtctcacgaggaccctgaagtgaagttcaattggtacgtggacggcgtggaagtgcacaacgccaagaccaagcctagagaggaacagtacaacagcacctacagagtggtgtccgtgctgaccgtgctgcaccaggattggctgaacggcaaagagtacaagtgcaaggtgtccaacaaggccctgcctctgcctgaggaaaagaccatcagcaaggccaagggccagcctcgcgaacctcaagtctgtacactgcctcctagccgcgaggaaatgaccaagaaccaggtgtccctgagctgcgccgtgaagggcttttacccttccgatatcgccgtggaatgggagagcaatggccagcctgagaacaactacaagacaacccctcctgtgctggacagcgacggctcattcttcctggtgtccaagctgacagtggacaagagcagatggcagcagggcaacgtgttcagctgcagcgtgctgcatgaagccctgcacagccactacacccagaagtccctgtctctgagccccggcaagtgataaggatccgatctggtactgcatgcacgcaatgctagctgcccctttcccgtcctgggtaccccgagtctcccccgacctcgggtcccaggtatgctcccacctccacctgccccactcaccacctctgctagttccagacacctcccaagcacgcagcaatgcagctcaaaacgcttagcctagccacacccccacgggaaacagcagtgattaacctttagcaataaacgaaagtttaactaagctatactaaccccagggttggtcaatttcgtgccagccacaccctcgagctagcaaaaaaaaaaaaaaaaaaaaaaaaaaaaaagcatatgactaaaaaaaaaaaaaaaaaaaaaaaaaaaaaaaaaaaaaaaaaaaaaaaaaaaaaaaaaaaaaaaaaaaaaa

SEQ ID NO: 831 - RNA, 2072 nt, synthetic construct
  source 1..2072: mol_type = other RNA
agaataaactagtattcttctggtccccacagactcagagagaacccgccaccatggattggatttggagaatcctgttcctcgtgggcgccgctaccggagcccactcccaaggcagactgtttcagtctggcgccgaagtgaaaagaccaggcgcctctgtgcggatcagctgcagagctgacgacgacccctacaccgacgacgataccttcaccaagtactggacccactggatcagacaggcccctggacaaagacctgagtggctgggagtgatcagccctcacttcgccagacctatctacagctacaagttccgggacagactgaccctgaccagagacagctctctgaccgccgtgtacctggaactgaagggcctgcagcctgacgacagcggcatctacttttgcgccagagatcccttcggcgacagagcccctcactacaactaccacatggacgtgtggggcggaggcacagccgtgatagtgtcttccggcggcggaggaagcggaggcgggggttctggcggtggtggctctggtggcggaggctcaggcggtggcggatctgaagttgtgctgacacagagccctgccatcctgagtgtgtccccaggcgatagagtgatcctgtcctgcagagcctctcagggcctcgattcttctcacctggcctggtacagattcaagcggggacagatccccacactggtcatcttcggcaccagcaacagagccagaggcacccctgatagattttccggctctggcagcggagccgacttcaccctgacaatcagcagagtggaacccgaggacttcgccacctactactgccagagatacggcggcacccctatcacatttggcggcggaaccacactggacaagaaaggcggaggtggaagtggtggtggcggtagcggaggcggtgggtccggaggtggtggatctgaacctaagagcagcgacaagacccacacctgtcctccatgtcctgctccagaactgctggccggaccttccgtgttcctgtttcctccaaagcctaaggacaccctgatgatcagcagaacccctgaagtgacctgcgtggtggtggatgtgtctcacgaggaccctgaagtgaagttcaattggtacgtggacggcgtggaagtgcacaacgccaagaccaagcctagagaggaacagtacaacagcacctacagagtggtgtccgtgctgaccgtgctgcaccaggattggctgaacggcaaagagtacaagtgcaaggtgtccaacaaggccctgcctgcccctgaggaaaagaccatcagcaaggccaagggccagcctcgcgaacctcaagtctgtacactgcctcctagccgcgaggaaatgaccaagaaccaggtgtccctgagctgcgccgtgaagggcttttacccttccgatatcgccgtggaatgggagagcaatggccagcctgagaacaactacaagacaacccctcctgtgctggacagcgacggctcattcttcctggtgtccaagctgacagtggacaagagcagatggcagcagggcaacgtgttcagctgcagcgtgctgcatgaagccctgcacagccactacacccagaagtccctgtctctgagccccggcaagtgataaggatccgatctggtactgcatgcacgcaatgctagctgcccctttcccgtcctgggtaccccgagtctcccccgacctcgggtcccaggtatgctcccacctccacctgccccactcaccacctctgctagttccagacacctcccaagcacgcagcaatgcagctcaaaacgcttagcctagccacacccccacgggaaacagcagtgattaacctttagcaataaacgaaagtttaactaagctatactaaccccagggttggtcaatttcgtgccagccacaccctcgagctagcaaaaaaaaaaaaaaaaaaaaaaaaaaaaaagcatatgactaaaaaaaaaaaaaaaaaaaaaaaaaaaaaaaaaaaaaaaaaaaaaaaaaaaaaaaaaaaaaaaaaaaaaa

SEQ ID NO: 832 - RNA, 2072 nt, synthetic construct
  source 1..2072: mol_type = other RNA
agaataaactagtattcttctggtccccacagactcagagagaacccgccaccatggattggatttggagaatcctgttcctcgtgggcgccgctaccggagcccactcccaaggcagactgtttcagtctggcgccgaagtgaaaagaccaggcgcctctgtgcggatcagctgcagagctgacgacgacccctacaccgacgacgataccttcaccaagtactggacccactggatcagacaggcccctggacaaagacctgagtggctgggagtgatcagccctcacttcgccagacctatctacagctacaagttccgggacagactgaccctgaccagagacagctctctgaccgccgtgtacctggaactgaagggcctgcagcctgacgacagcggcatctacttttgcgccagagatcccttcggcgacagagcccctcactacaactaccacatggacgtgtggggcggaggcacagccgtgatagtgtcttccggcggcggaggaagcggaggcgggggttctggcggtggtggctctggtggcggaggctcaggcggtggcggatctgaagttgtgctgacacagagccctgccatcctgagtgtgtccccaggcgatagagtgatcctgtcctgcagagcctctcagggcctcgattcttctcacctggcctggtacagattcaagcggggacagatccccacactggtcatcttcggcaccagcaacagagccagaggcacccctgatagattttccggctctggcagcggagccgacttcaccctgacaatcagcagagtggaacccgaggacttcgccacctactactgccagagatacggcggcacccctatcacatttggcggcggaaccacactggacaagaaaggcggaggtggaagtggtggtggcggtagcggaggcggtgggtccggaggtggtggatctgaacctaagagcagcgacaagacccacacctgtcctccatgtcctgctccagaactgctcggcggaccttccgtgttcctgtttcctccaaagcctaaggacaccctgatgatcagcagaacccctgaagtgacctgcgtggtggtggatgtgtctcacgaggacccagaagtgaagttcaattggtacgtggacggcgtggaagtgcacaacgccaagaccaagcctagagaggaacagtacaacagcacctacagagtggtgtccgtgctgacagtgctgcaccaggattggctgaacggcaaagagtacaagtgcaaggtgtccaacaaggccctgcctgctcctatcgagaaaaccatcagcaaggccaagggccagcctagggaaccccaggtttacaccctgcctccatgccgcgaggaaatgaccaagaaccaggtgtccctgtggtgcctggtcaagggcttctacccttccgatatcgccgtggaatgggagagcaatggccagcctgagaacaactacaagacaacccctcctgtgctggacagcgacggctcattcttcctgtacagcaagctgacagtggacaagagcagatggcagcagggcaacgtgttcagctgcagcgtgctgcatgaagccctgcacagccactacacccagaagtccctgtctctgagccccggcaagtgataaggatccgatctggtactgcatgcacgcaatgctagctgcccctttcccgtcctgggtaccccgagtctcccccgacctcgggtcccaggtatgctcccacctccacctgccccactcaccacctctgctagttccagacacctcccaagcacgcagcaatgcagctcaaaacgcttagcctagccacacccccacgggaaacagcagtgattaacctttagcaataaacgaaagtttaactaagctatactaaccccagggttggtcaatttcgtgccagccacaccctcgagctagcaaaaaaaaaaaaaaaaaaaaaaaaaaaaaagcatatgactaaaaaaaaaaaaaaaaaaaaaaaaaaaaaaaaaaaaaaaaaaaaaaaaaaaaaaaaaaaaaaaaaaaaaa

SEQ ID NO: 833 - RNA, 2072 nt, synthetic construct
  source 1..2072: mol_type = other RNA
agaataaactagtattcttctggtccccacagactcagagagaacccgccaccatggattggatttggagaatcctgttcctcgtgggcgccgctaccggagcccactcccaaggcagactgtttcagtctggcgccgaagtgaaaagaccaggcgcctctgtgcggatcagctgcagagctgacgacgacccctacaccgacgacgataccttcaccaagtactggacccactggatcagacaggcccctggacaaagacctgagtggctgggagtgatcagccctcacttcgccagacctatctacagctacaagttccgggacagactgaccctgaccagagacagctctctgaccgccgtgtacctggaactgaagggcctgcagcctgacgacagcggcatctacttttgcgccagagatcccttcggcgacagagcccctcactacaactaccacatggacgtgtggggcggaggcacagccgtgatagtgtcttccggcggcggaggaagcggaggcgggggttctggcggtggtggctctggtggcggaggctcaggcggtggcggatctgaagttgtgctgacacagagccctgccatcctgagtgtgtccccaggcgatagagtgatcctgtcctgcagagcctctcagggcctcgattcttctcacctggcctggtacagattcaagcggggacagatccccacactggtcatcttcggcaccagcaacagagccagaggcacccctgatagattttccggctctggcagcggagccgacttcaccctgacaatcagcagagtggaacccgaggacttcgccacctactactgccagagatacggcggcacccctatcacatttggcggcggaaccacactggacaagaaaggcggaggtggaagtggtggtggcggtagcggaggcggtgggtccggaggtggtggatctgaacctaagagcagcgacaagacccacacctgtcctccatgtcctgctccagaactgctggccggaccttccgtgttcctgtttcctccaaagcctaaggacaccctgatgatcagcagaacccctgaagtgacctgcgtggtggtggatgtgtctcacgaggaccctgaagtgaagttcaattggtacgtggacggcgtggaagtgcacaacgccaagaccaagcctagagaggaacagtacaacagcacctacagagtggtgtccgtgctgaccgtgctgcaccaggattggctgaacggcaaagagtacaagtgcaaggtgtccaacaaggccctgcctctgcctgaggaaaagaccatcagcaaggccaagggccagcctagggaaccccaggtttacaccctgcctccatgccgcgaggaaatgaccaagaaccaggtgtccctgtggtgcctggtcaagggcttctacccttccgatatcgccgtggaatgggagagcaatggccagcctgagaacaactacaagacaacccctcctgtgctggacagcgacggctcattcttcctgtacagcaagctgacagtggacaagagcagatggcagcagggcaacgtgttcagctgcagcgtgctgcatgaagccctgcacagccactacacccagaagtccctgtctctgagccccggcaagtgataaggatccgatctggtactgcatgcacgcaatgctagctgcccctttcccgtcctgggtaccccgagtctcccccgacctcgggtcccaggtatgctcccacctccacctgccccactcaccacctctgctagttccagacacctcccaagcacgcagcaatgcagctcaaaacgcttagcctagccacacccccacgggaaacagcagtgattaacctttagcaataaacgaaagtttaactaagctatactaaccccagggttggtcaatttcgtgccagccacaccctcgagctagcaaaaaaaaaaaaaaaaaaaaaaaaaaaaaagcatatgactaaaaaaaaaaaaaaaaaaaaaaaaaaaaaaaaaaaaaaaaaaaaaaaaaaaaaaaaaaaaaaaaaaaaaa

SEQ ID NO: 834 - RNA, 2072 nt, synthetic construct
  source 1..2072: mol_type = other RNA
agaataaactagtattcttctggtccccacagactcagagagaacccgccaccatggattggatttggagaatcctgttcctcgtgggcgccgctaccggagcccactcccaaggcagactgtttcagtctggcgccgaagtgaaaagaccaggcgcctctgtgcggatcagctgcagagctgacgacgacccctacaccgacgacgataccttcaccaagtactggacccactggatcagacaggcccctggacaaagacctgagtggctgggagtgatcagccctcacttcgccagacctatctacagctacaagttccgggacagactgaccctgaccagagacagctctctgaccgccgtgtacctggaactgaagggcctgcagcctgacgacagcggcatctacttttgcgccagagatcccttcggcgacagagcccctcactacaactaccacatggacgtgtggggcggaggcacagccgtgatagtgtcttccggcggcggaggaagcggaggcgggggttctggcggtggtggctctggtggcggaggctcaggcggtggcggatctgaagttgtgctgacacagagccctgccatcctgagtgtgtccccaggcgatagagtgatcctgtcctgcagagcctctcagggcctcgattcttctcacctggcctggtacagattcaagcggggacagatccccacactggtcatcttcggcaccagcaacagagccagaggcacccctgatagattttccggctctggcagcggagccgacttcaccctgacaatcagcagagtggaacccgaggacttcgccacctactactgccagagatacggcggcacccctatcacatttggcggcggaaccacactggacaagaaaggcggaggtggaagtggtggtggcggtagcggaggcggtgggtccggaggtggtggatctgaacctaagagcagcgacaagacccacacctgtcctccatgtcctgctccagaactgctggccggaccttccgtgttcctgtttcctccaaagcctaaggacaccctgatgatcagcagaacccctgaagtgacctgcgtggtggtggatgtgtctcacgaggaccctgaagtgaagttcaattggtacgtggacggcgtggaagtgcacaacgccaagaccaagcctagagaggaacagtacaacagcacctacagagtggtgtccgtgctgaccgtgctgcaccaggattggctgaacggcaaagagtacaagtgcaaggtgtccaacaaggccctgcctgcccctgaggaaaagaccatcagcaaggccaagggccagcctagggaaccccaggtttacaccctgcctccatgccgcgaggaaatgaccaagaaccaggtgtccctgtggtgcctggtcaagggcttctacccttccgatatcgccgtggaatgggagagcaatggccagcctgagaacaactacaagacaacccctcctgtgctggacagcgacggctcattcttcctgtacagcaagctgacagtggacaagagcagatggcagcagggcaacgtgttcagctgcagcgtgctgcatgaagccctgcacagccactacacccagaagtccctgtctctgagccccggcaagtgataaggatccgatctggtactgcatgcacgcaatgctagctgcccctttcccgtcctgggtaccccgagtctcccccgacctcgggtcccaggtatgctcccacctccacctgccccactcaccacctctgctagttccagacacctcccaagcacgcagcaatgcagctcaaaacgcttagcctagccacacccccacgggaaacagcagtgattaacctttagcaataaacgaaagtttaactaagctatactaaccccagggttggtcaatttcgtgccagccacaccctcgagctagcaaaaaaaaaaaaaaaaaaaaaaaaaaaaaagcatatgactaaaaaaaaaaaaaaaaaaaaaaaaaaaaaaaaaaaaaaaaaaaaaaaaaaaaaaaaaaaaaaaaaaaaaa

SEQ ID NO: 835 - RNA, 2072 nt, synthetic construct; identical to SEQ ID NO: 829
  source 1..2072: mol_type = other RNA

SEQ ID NO: 836 - RNA, 2072 nt, synthetic construct; identical to SEQ ID NO: 830
  source 1..2072: mol_type = other RNA

SEQ ID NO: 837 - RNA, 2072 nt, synthetic construct; identical to SEQ ID NO: 831
  source 1..2072: mol_type = other RNA

SEQ ID NO: 838 - RNA, 2072 nt, synthetic construct; identical to SEQ ID NO: 832
  source 1..2072: mol_type = other RNA

SEQ ID NO: 839 - RNA, 2072 nt, synthetic construct; identical to SEQ ID NO: 833
  source 1..2072: mol_type = other RNA

SEQ ID NO: 840 - RNA, 2072 nt, synthetic construct; identical to SEQ ID NO: 834
  source 1..2072: mol_type = other RNA

SEQ ID NO: 841 - RNA, 2072 nt, synthetic construct
  source 1..2072: mol_type = other RNA
agaataaactagtattcttctggtccccacagactcagagagaacccgccaccatggattggatttggagaatcctgttcctcgtgggcgccgctaccggagcccactcccaaggcagactgtttcagtctggcgccgaagtgaaaagaccaggcgcctctgtgcggatcagctgcagagctgacgacgacccctacaccgacgacgataccttcaccaagtactggacccactggatcagacaggcccctggacaaagacctgagtggctgggagtgatcagccctcacttcgccagacctatctacagctacaagttccgggacagactgaccctgaccagagacagctctctgaccgccgtgtacctggaactgaagggcctgcagcctgacgacagcggcatctacttttgcgccagagatcccttcggcgacagagcccctcactacaactaccacatggacgtgtggggcggaggcacagccgtgatagtgtcttccggcggcggaggaagcggaggcgggggttctggcggtggtggctctggtggcggaggctcaggcggtggcggatctgaagttgtgctgacacagagccctgccatcctgagtgtgtccccaggcgatagagtgatcctgtcctgcagagcctctcagggcctcgattcttctcacctggcctggtacagattcaagcggggacagatccccacactggtcatcttcggcaccagcaacagagccagaggcacccctgatagattttccggctctggcagcggagccgacttcaccctgacaatcagcagagtggaacccgaggacttcgccacctactactgccagagatacggcggcacccctatcacatttggcggcggaaccacactggacaagaaaggcggaggtggaagtggtggtggcggtagcggaggcggtgggtccggaggtggtggatctgaacctaagagcagcgacaagacccacacctgtcctccatgtcctgctccagaactgctcggcggaccttccgtgttcctgtttcctccaaagcctaaggacaccctgatgatcagcagaacccctgaagtgacctgcgtggtggtggatgtgtctcacgaggacccagaagtgaagttcaattggtacgtggacggcgtggaagtgcacaacgccaagaccaagcctagagaggaacagtacaacagcacctacagagtggtgtccgtgctgacagtgctgcaccaggattggctgaacggcaaagagtacaagtgcaaggtgtccaacaaggccctgcctgctcctatcgagaaaaccatcagcaaggccaagggccagcctcgcgaacctcaagtctgtacactgcctcctagccgcgacgaactgaccaagaaccaggtgtccctgagctgcgccgtgaagggcttttacccttccgatatcgccgtggaatgggagagcaatggccagcctgagaacaactacaagacaacccctcctgtgctggacagcgacggctcattcttcctggtgtccaagctgacagtggacaagagcagatggcagcagggcaacgtgttcagctgcagcgtgctgcatgaagccctgcacagccactacacccagaagtccctgtctctgagccccggcaagtgataaggatccgatctggtactgcatgcacgcaatgctagctgcccctttcccgtcctgggtaccccgagtctcccccgacctcgggtcccaggtatgctcccacctccacctgccccactcaccacctctgctagttccagacacctcccaagcacgcagcaatgcagctcaaaacgcttagcctagccacacccccacgggaaacagcagtgattaacctttagcaataaacgaaagtttaactaagctatactaaccccagggttggtcaatttcgtgccagccacaccctcgagctagcaaaaaaaaaaaaaaaaaaaaaaaaaaaaaagcatatgactaaaaaaaaaaaaaaaaaaaaaaaaaaaaaaaaaaaaaaaaaaaaaaaaaaaaaaaaaaaaaaaaaaaaaa

SEQ ID NO: 842 - RNA, 2072 nt, synthetic construct
  source 1..2072: mol_type = other RNA
agaataaactagtattcttctggtccccacagactcagagagaacccgccaccatggattggatttggagaatcctgttcctcgtgggcgccgctaccggagcccactcccaaggcagactgtttcagtctggcgccgaagtgaaaagaccaggcgcctctgtgcggatcagctgcagagctgacgacgacccctacaccgacgacgataccttcaccaagtactggacccactggatcagacaggcccctggacaaagacctgagtggctgggagtgatcagccctcacttcgccagacctatctacagctacaagttccgggacagactgaccctgaccagagacagctctctgaccgccgtgtacctggaactgaagggcctgcagcctgacgacagcggcatctacttttgcgccagagatcccttcggcgacagagcccctcactacaactaccacatggacgtgtggggcggaggcacagccgtgatagtgtcttccggcggcggaggaagcggaggcgggggttctggcggtggtggctctggtggcggaggctcaggcggtggcggatctgaagttgtgctgacacagagccctgccatcctgagtgtgtccccaggcgatagagtgatcctgtcctgcagagcctctcagggcctcgattcttctcacctggcctggtacagattcaagcggggacagatccccacactggtcatcttcggcaccagcaacagagccagaggcacccctgatagattttccggctctggcagcggagccgacttcaccctgacaatcagcagagtggaacccgaggacttcgccacctactactgccagagatacggcggcacccctatcacatttggcggcggaaccacactggacaagaaaggcggaggtggaagtggtggtggcggtagcggaggcggtgggtccggaggtggtggatctgaacctaagagcagcgacaagacccacacctgtcctccatgtcctgctccagaactgctggccggaccttccgtgttcctgtttcctccaaagcctaaggacaccctgatgatcagcagaacccctgaagtgacctgcgtggtggtggatgtgtctcacgaggaccctgaagtgaagttcaattggtacgtggacggcgtggaagtgcacaacgccaagaccaagcctagagaggaacagtacaacagcacctacagagtggtgtccgtgctgaccgtgctgcaccaggattggctgaacggcaaagagtacaagtgcaaggtgtccaacaaggccctgcctctgcctgaggaaaagaccatcagcaaggccaagggccagcctcgcgaacctcaagtctgtacactgcctcctagccgcgacgaactgaccaagaaccaggtgtccctgagctgcgccgtgaagggcttttacccttccgatatcgccgtggaatgggagagcaatggccagcctgagaacaactacaagacaacccctcctgtgctggacagcgacggctcattcttcctggtgtccaagctgacagtggacaagagcagatggcagcagggcaacgtgttcagctgcagcgtgctgcatgaagccctgcacagccactacacccagaagtccctgtctctgagccccggcaagtgataaggatccgatctggtactgcatgcacgcaatgctagctgcccctttcccgtcctgggtaccccgagtctcccccgacctcgggtcccaggtatgctcccacctccacctgccccactcaccacctctgctagttccagacacctcccaagcacgcagcaatgcagctcaaaacgcttagcctagccacacccccacgggaaacagcagtgattaacctttagcaataaacgaaagtttaactaagctatactaaccccagggttggtcaatttcgtgccagccacaccctcgagctagcaaaaaaaaaaaaaaaaaaaaaaaaaaaaaagcatatgactaaaaaaaaaaaaaaaaaaaaaaaaaaaaaaaaaaaaaaaaaaaaaaaaaaaaaaaaaaaaaaaaaaaaaa

SEQ ID NO: 843 - RNA, 2072 nt, synthetic construct
  source 1..2072: mol_type = other RNA
agaataaactagtattcttctggtccccacagactcagagagaacccgccaccatggattggatttggagaatcctgttcctcgtgggcgccgctaccggagcccactcccaaggcagactgtttcagtctggcgccgaagtgaaaagaccaggcgcctctgtgcggatcagctgcagagctgacgacgacccctacaccgacgacgataccttcaccaagtactggacccactggatcagacaggcccctggacaaagacctgagtggctgggagtgatcagccctcacttcgccagacctatctacagctacaagttccgggacagactgaccctgaccagagacagctctctgaccgccgtgtacctggaactgaagggcctgcagcctgacgacagcggcatctacttttgcgccagagatcccttcggcgacagagcccctcactacaactaccacatggacgtgtggggcggaggcacagccgtgatagtgtcttccggcggcggaggaagcggaggcgggggttctggcggtggtggctctggtggcggaggctcaggcggtggcggatctgaagttgtgctgacacagagccctgccatcctgagtgtgtccccaggcgatagagtgatcctgtcctgcagagcctctcagggcctcgattcttctcacctggcctggtacagattcaagcggggacagatccccacactggtcatcttcggcaccagcaacagagccagaggcacccctgatagattttccggctctggcagcggagccgacttcaccctgacaatcagcagagtggaacccgaggacttcgccacctactactgccagagatacggcggcacccctatcacatttggcggcggaaccacactggacaagaaaggcggaggtggaagtggtggtggcggtagcggaggcggtgggtccggaggtggtggatctgaacctaagagcagcgacaagacccacacctgtcctccatgtcctgctccagaactgctggccggaccttccgtgttcctgtttcctccaaagcctaaggacaccctgatgatcagcagaacccctgaagtgacctgcgtggtggtggatgtgtctcacgaggaccctgaagtgaagttcaattggtacgtggacggcgtggaagtgcacaacgccaagaccaagcctagagaggaacagtacaacagcacctacagagtggtgtccgtgctgaccgtgctgcaccaggattggctgaacggcaaagagtacaagtgcaaggtgtccaacaaggccctgcctgcccctgaggaaaagaccatcagcaaggccaagggccagcctcgcgaacctcaagtctgtacactgcctcctagccgcgacgaactgaccaagaaccaggtgtccctgagctgcgccgtgaagggcttttacccttccgatatcgccgtggaatgggagagcaatggccagcctgagaacaactacaagacaacccctcctgtgctggacagcgacggctcattcttcctggtgtccaagctgacagtggacaagagcagatggcagcagggcaacgtgttcagctgcagcgtgctgcatgaagccctgcacagccactacacccagaagtccctgtctctgagccccggcaagtgataaggatccgatctggtactgcatgcacgcaatgctagctgcccctttcccgtcctgggtaccccgagtctcccccgacctcgggtcccaggtatgctcccacctccacctgccccactcaccacctctgctagttccagacacctcccaagcacgcagcaatgcagctcaaaacgcttagcctagccacacccccacgggaaacagcagtgattaacctttagcaataaacgaaagtttaactaagctatactaaccccagggttggtcaatttcgtgccagccacaccctcgagctagcaaaaaaaaaaaaaaaaaaaaaaaaaaaaaagcatatgactaaaaaaaaaaaaaaaaaaaaaaaaaaaaaaaaaaaaaaaaaaaaaaaaaaaaaaaaaaaaaaaaaaaaaa

SEQ ID NO: 844 - RNA, 2072 nt, synthetic construct
  source 1..2072: mol_type = other RNA
agaataaactagtattcttctggtccccacagactcagagagaacccgccaccatggattggatttggagaatcctgttcctcgtgggcgccgctaccggagcccactcccaaggcagactgtttcagtctggcgccgaagtgaaaagaccaggcgcctctgtgcggatcagctgcagagctgacgacgacccctacaccgacgacgataccttcaccaagtactggacccactggatcagacaggcccctggacaaagacctgagtggctgggagtgatcagccctcacttcgccagacctatctacagctacaagttccgggacagactgaccctgaccagagacagctctctgaccgccgtgtacctggaactgaagggcctgcagcctgacgacagcggcatctacttttgcgccagagatcccttcggcgacagagcccctcactacaactaccacatggacgtgtggggcggaggcacagccgtgatagtgtcttccggcggcggaggaagcggaggcgggggttctggcggtggtggctctggtggcggaggctcaggcggtggcggatctgaagttgtgctgacacagagccctgccatcctgagtgtgtccccaggcgatagagtgatcctgtcctgcagagcctctcagggcctcgattcttctcacctggcctggtacagattcaagcggggacagatccccacactggtcatcttcggcaccagcaacagagccagaggcacccctgatagattttccggctctggcagcggagccgacttcaccctgacaatcagcagagtggaacccgaggacttcgccacctactactgccagagatacggcggcacccctatcacatttggcggcggaaccacactggacaagaaaggcggaggtggaagtggtggtggcggtagcggaggcggtgggtccggaggtggtggatctgaacctaagagcagcgacaagacccacacctgtcctccatgtcctgctccagaactgctcggcggaccttccgtgttcctgtttcctccaaagcctaaggacaccctgatgatcagcagaacccctgaagtgacctgcgtggtggtggatgtgtctcacgaggacccagaagtgaagttcaattggtacgtggacggcgtggaagtgcacaacgccaagaccaagcctagagaggaacagtacaacagcacctacagagtggtgtccgtgctgacagtgctgcaccaggattggctgaacggcaaagagtacaagtgcaaggtgtccaacaaggccctgcctgctcctatcgagaaaaccatcagcaaggccaagggccagcctagggaaccccaggtttacaccctgcctccatgccgcgacgaactgaccaagaaccaggtgtccctgtggtgcctggtcaagggcttctacccttccgatatcgccgtggaatgggagagcaatggccagcctgagaacaactacaagacaacccctcctgtgctggacagcgacggctcattcttcctgtacagcaagctgacagtggacaagagcagatggcagcagggcaacgtgttcagctgcagcgtgctgcatgaagccctgcacagccactacacccagaagtccctgtctctgagccccggcaagtgataaggatccgatctggtactgcatgcacgcaatgctagctgcccctttcccgtcctgggtaccccgagtctcccccgacctcgggtcccaggtatgctcccacctccacctgccccactcaccacctctgctagttccagacacctcccaagcacgcagcaatgcagctcaaaacgcttagcctagccacacccccacgggaaacagcagtgattaacctttagcaataaacgaaagtttaactaagctatactaaccccagggttggtcaatttcgtgccagccacaccctcgagctagcaaaaaaaaaaaaaaaaaaaaaaaaaaaaaagcatatgactaaaaaaaaaaaaaaaaaaaaaaaaaaaaaaaaaaaaaaaaaaaaaaaaaaaaaaaaaaaaaaaaaaaaaa

SEQ ID NO: 845 - RNA, 2072 nt, synthetic construct
  source 1..2072: mol_type = other RNA
agaataaactagtattcttctggtccccacagactcagagagaacccgccaccatggattggatttggagaatcctgttcctcgtgggcgccgctaccggagcccactcccaaggcagactgtttcagtctggcgccgaagtgaaaagaccaggcgcctctgtgcggatcagctgcagagctgacgacgacccctacaccgacgacgataccttcaccaagtactggacccactggatcagacaggcccctggacaaagacctgagtggctgggagtgatcagccctcacttcgccagacctatctacagctacaagttccgggacagactgaccctgaccagagacagctctctgaccgccgtgtacctggaactgaagggcctgcagcctgacgacagcggcatctacttttgcgccagagatcccttcggcgacagagcccctcactacaactaccacatggacgtgtggggcggaggcacagccgtgatagtgtcttccggcggcggaggaagcggaggcgggggttctggcggtggtggctctggtggcggaggctcaggcggtggcggatctgaagttgtgctgacacagagccctgccatcctgagtgtgtccccaggcgatagagtgatcctgtcctgcagagcctctcagggcctcgattcttctcacctggcctggtacagattcaagcggggacagatccccacactggtcatcttcggcaccagcaacagagccagaggcacccctgatagattttccggctctggcagcggagccgacttcaccctgacaatcagcagagtggaacccgaggacttcgccacctactactgccagagatacggcggcacccctatcacatttggcggcggaaccacactggacaagaaaggcggaggtggaagtggtggtggcggtagcggaggcggtgggtccggaggtggtggatctgaacctaagagcagcgacaagacccacacctgtcctccatgtcctgctccagaactgctggccggaccttccgtgttcctgtttcctccaaagcctaaggacaccctgatgatcagcagaacccctgaagtgacctgcgtggtggtggatgtgtctcacgaggaccctgaagtgaagttcaattggtacgtggacggcgtggaagtgcacaacgccaagaccaagcctagagaggaacagtacaacagcacctacagagtggtgtccgtgctgaccgtgctgcaccaggattggctgaacggcaaagagtacaagtgcaaggtgtccaacaaggccctgcctctgcctgaggaaaagaccatcagcaaggccaagggccagcctagggaaccccaggtttacaccctgcctccatgccgcgacgaactgaccaagaaccaggtgtccctgtggtgcctggtcaagggcttctacccttccgatatcgccgtggaatgggagagcaatggccagcctgagaacaactacaagacaacccctcctgtgctggacagcgacggctcattcttcctgtacagcaagctgacagtggacaagagcagatggcagcagggcaacgtgttcagctgcagcgtgctgcatgaagccctgcacagccactacacccagaagtccctgtctctgagccccggcaagtgataaggatccgatctggtactgcatgcacgcaatgctagctgcccctttcccgtcctgggtaccccgagtctcccccgacctcgggtcccaggtatgctcccacctccacctgccccactcaccacctctgctagttccagacacctcccaagcacgcagcaatgcagctcaaaacgcttagcctagccacacccccacgggaaacagcagtgattaacctttagcaataaacgaaagtttaactaagctatactaaccccagggttggtcaatttcgtgccagccacaccctcgagctagcaaaaaaaaaaaaaaaaaaaaaaaaaaaaaagcatatgactaaaaaaaaaaaaaaaaaaaaaaaaaaaaaaaaaaaaaaaaaaaaaaaaaaaaaaaaaaaaaaaaaaaaaa

SEQ ID NO: 846 - RNA, 2072 nt, synthetic construct
  source 1..2072: mol_type = other RNA
agaataaactagtattcttctggtccccacagactcagagagaacccgccaccatggattggatttggagaatcctgttcctcgtgggcgccgctaccggagcccactcccaaggcagactgtttcagtctggcgccgaagtgaaaagaccaggcgcctctgtgcggatcagctgcagagctgacgacgacccctacaccgacgacgataccttcaccaagtactggacccactggatcagacaggcccctggacaaagacctgagtggctgggagtgatcagccctcacttcgccagacctatctacagctacaagttccgggacagactgaccctgaccagagacagctctctgaccgccgtgtacctggaactgaagggcctgcagcctgacgacagcggcatctacttttgcgccagagatcccttcggcgacagagcccctcactacaactaccacatggacgtgtggggcggaggcacagccgtgatagtgtcttccggcggcggaggaagcggaggcgggggttctggcggtggtggctctggtggcggaggctcaggcggtggcggatctgaagttgtgctgacacagagccctgccatcctgagtgtgtccccaggcgatagagtgatcctgtcctgcagagcctctcagggcctcgattcttctcacctggcctggtacagattcaagcggggacagatccccacactggtcatcttcggcaccagcaacagagccagaggcacccctgatagattttccggctctggcagcggagccgacttcaccctgacaatcagcagagtggaacccgaggacttcgccacctactactgccagagatacggcggcacccctatcacatttggcggcggaaccacactggacaagaaaggcggaggtggaagtggtggtggcggtagcggaggcggtgggtccggaggtggtggatctgaacctaagagcagcgacaagacccacacctgtcctccatgtcctgctccagaactgctggccggaccttccgtgttcctgtttcctccaaagcctaaggacaccctgatgatcagcagaacccctgaagtgacctgcgtggtggtggatgtgtctcacgaggaccctgaagtgaagttcaattggtacgtggacggcgtggaagtgcacaacgccaagaccaagcctagagaggaacagtacaacagcacctacagagtggtgtccgtgctgaccgtgctgcaccaggattggctgaacggcaaagagtacaagtgcaaggtgtccaacaaggccctgcctgcccctgaggaaaagaccatcagcaaggccaagggccagcctagggaaccccaggtttacaccctgcctccatgccgcgacgaactgaccaagaaccaggtgtccctgtggtgcctggtcaagggcttctacccttccgatatcgccgtggaatgggagagcaatggccagcctgagaacaactacaagacaacccctcctgtgctggacagcgacggctcattcttcctgtacagcaagctgacagtggacaagagcagatggcagcagggcaacgtgttcagctgcagcgtgctgcatgaagccctgcacagccactacacccagaagtccctgtctctgagccccggcaagtgataaggatccgatctggtactgcatgcacgcaatgctagctgcccctttcccgtcctgggtaccccgagtctcccccgacctcgggtcccaggtatgctcccacctccacctgccccactcaccacctctgctagttccagacacctcccaagcacgcagcaatgcagctcaaaacgcttagcctagccacacccccacgggaaacagcagtgattaacctttagcaataaacgaaagtttaactaagctatactaaccccagggttggtcaatttcgtgccagccacaccctcgagctagcaaaaaaaaaaaaaaaaaaaaaaaaaaaaaagcatatgactaaaaaaaaaaaaaaaaaaaaaaaaaaaaaaaaaaaaaaaaaaaaaaaaaaaaaaaaaaaaaaaaaaaaaa

SEQ ID NO: 847 - RNA, 2072 nt, synthetic construct
  source 1..2072: mol_type = other RNA
agaataaactagtattcttctggtccccacagactcagagagaacccgccaccatggattggatttggagaatcctgttcctcgtgggcgccgctaccggagcccactccgaagtggtgctgacacagagccccgccatcctgagtgttagccctggcgatagagtgatcctgagctgcagagcctctcagggcctcgattcttctcacctggcctggtacagattcaagcggggacagatccccacactggtcatcttcggcaccagcaacagagccagaggcacccctgatagattttccggctctggcagcggagccgacttcaccctgacaatcagcagagtggaacccgaggacttcgccacctactactgccagagatacggcggcacccctatcacatttggcggcggaaccacactggacaagaaaggcggcggaggaagcggaggcggaggttctggtggtggtggctctggtggcggaggctcaggcggtggcggatctcaaggcagactgtttcagtctggcgccgaagtgaaaagaccaggcgcctctgtgcggatcagctgtagagccgacgacgacccctacaccgacgatgacaccttcaccaagtactggacccactggatcagacaggcccctggacaaagacctgagtggctgggagtgatcagccctcacttcgccagacctatctacagctacaagttccgggacagactgaccctgaccagagacagctctctgaccgccgtgtacctggaactgaagggcctgcagcctgacgacagcggcatctacttttgcgccagagatcccttcggcgacagggctccccactacaactaccacatggatgtgtggggaggcggcacagccgtgattgtgtcttccggcggcggaggaagcggaggcggaggttctggtggcggaggctcaggcggtggcggatctgaacctaagagcagcgacaagacccacacctgtcctccatgtcctgctccagaactgctcggcggaccttccgtgttcctgtttcctccaaagcctaaggacaccctgatgatcagcagaacccctgaagtgacctgcgtggtggtggatgtgtctcacgaggacccagaagtgaagttcaattggtacgtggacggcgtggaagtgcacaacgccaagaccaagcctagagaggaacagtacaacagcacctacagagtggtgtccgtgctgacagtgctgcaccaggattggctgaacggcaaagagtacaagtgcaaggtgtccaacaaggccctgcctgctcctatcgagaaaaccatcagcaaggccaagggccagcctcgcgaacctcaagtctgtacactgcctcctagccgcgaggaaatgaccaagaaccaggtgtccctgagctgcgccgtgaagggcttttacccttccgatatcgccgtggaatgggagagcaatggccagcctgagaacaactacaagacaacccctcctgtgctggacagcgacggctcattcttcctggtgtccaagctgacagtggacaagagcagatggcagcagggcaacgtgttcagctgcagcgtgctgcatgaagccctgcacagccactacacccagaagtccctgtctctgagccccggcaagtgataaggatccgatctggtactgcatgcacgcaatgctagctgcccctttcccgtcctgggtaccccgagtctcccccgacctcgggtcccaggtatgctcccacctccacctgccccactcaccacctctgctagttccagacacctcccaagcacgcagcaatgcagctcaaaacgcttagcctagccacacccccacgggaaacagcagtgattaacctttagcaataaacgaaagtttaactaagctatactaaccccagggttggtcaatttcgtgccagccacaccctcgagctagcaaaaaaaaaaaaaaaaaaaaaaaaaaaaaagcatatgactaaaaaaaaaaaaaaaaaaaaaaaaaaaaaaaaaaaaaaaaaaaaaaaaaaaaaaaaaaaaaaaaaaaaaa

SEQ ID NO: 848 - RNA, 2072 nt, synthetic construct
  source 1..2072: mol_type = other RNA
agaataaactagtattcttctggtccccacagactcagagagaacccgccaccatggattggatttggagaatcctgttcctcgtgggcgccgctaccggagcccactccgaagtggtgctgacacagagccccgccatcctgagtgttagccctggcgatagagtgatcctgagctgcagagcctctcagggcctcgattcttctcacctggcctggtacagattcaagcggggacagatccccacactggtcatcttcggcaccagcaacagagccagaggcacccctgatagattttccggctctggcagcggagccgacttcaccctgacaatcagcagagtggaacccgaggacttcgccacctactactgccagagatacggcggcacccctatcacatttggcggcggaaccacactggacaagaaaggcggcggaggaagcggaggcggaggttctggtggtggtggctctggtggcggaggctcaggcggtggcggatctcaaggcagactgtttcagtctggcgccgaagtgaaaagaccaggcgcctctgtgcggatcagctgtagagccgacgacgacccctacaccgacgatgacaccttcaccaagtactggacccactggatcagacaggcccctggacaaagacctgagtggctgggagtgatcagccctcacttcgccagacctatctacagctacaagttccgggacagactgaccctgaccagagacagctctctgaccgccgtgtacctggaactgaagggcctgcagcctgacgacagcggcatctacttttgcgccagagatcccttcggcgacagggctccccactacaactaccacatggatgtgtggggaggcggcacagccgtgattgtgtcttccggcggcggaggaagcggaggcggaggttctggtggcggaggctcaggcggtggcggatctgaacctaagagcagcgacaagacccacacctgtcctccatgtcctgctccagaactgctggccggaccttccgtgttcctgtttcctccaaagcctaaggacaccctgatgatcagcagaacccctgaagtgacctgcgtggtggtggatgtgtctcacgaggaccctgaagtgaagttcaattggtacgtggacggcgtggaagtgcacaacgccaagaccaagcctagagaggaacagtacaacagcacctacagagtggtgtccgtgctgaccgtgctgcaccaggattggctgaacggcaaagagtacaagtgcaaggtgtccaacaaggccctgcctctgcctgaggaaaagaccatcagcaaggccaagggccagcctcgcgaacctcaagtctgtacactgcctcctagccgcgaggaaatgaccaagaaccaggtgtccctgagctgcgccgtgaagggcttttacccttccgatatcgccgtggaatgggagagcaatggccagcctgagaacaactacaagacaacccctcctgtgctggacagcgacggctcattcttcctggtgtccaagctgacagtggacaagagcagatggcagcagggcaacgtgttcagctgcagcgtgctgcatgaagccctgcacagccactacacccagaagtccctgtctctgagccccggcaagtgataaggatccgatctggtactgcatgcacgcaatgctagctgcccctttcccgtcctgggtaccccgagtctcccccgacctcgggtcccaggtatgctcccacctccacctgccccactcaccacctctgctagttccagacacctcccaagcacgcagcaatgcagctcaaaacgcttagcctagccacacccccacgggaaacagcagtgattaacctttagcaataaacgaaagtttaactaagctatactaaccccagggttggtcaatttcgtgccagccacaccctcgagctagcaaaaaaaaaaaaaaaaaaaaaaaaaaaaaagcatatgactaaaaaaaaaaaaaaaaaaaaaaaaaaaaaaaaaaaaaaaaaaaaaaaaaaaaaaaaaaaaaaaaaaaaaa

SEQ ID NO: 849 - RNA, 2072 nt, synthetic construct
  source 1..2072: mol_type = other RNA
agaataaactagtattcttctggtccccacagactcagagagaacccgccaccatggattggatttggagaatcctgttcctcgtgggcgccgctaccggagcccactccgaagtggtgctgacacagagccccgccatcctgagtgttagccctggcgatagagtgatcctgagctgcagagcctctcagggcctcgattcttctcacctggcctggtacagattcaagcggggacagatccccacactggtcatcttcggcaccagcaacagagccagaggcacccctgatagattttccggctctggcagcggagccgacttcaccctgacaatcagcagagtggaacccgaggacttcgccacctactactgccagagatacggcggcacccctatcacatttggcggcggaaccacactggacaagaaaggcggcggaggaagcggaggcggaggttctggtggtggtggctctggtggcggaggctcaggcggtggcggatctcaaggcagactgtttcagtctggcgccgaagtgaaaagaccaggcgcctctgtgcggatcagctgtagagccgacgacgacccctacaccgacgatgacaccttcaccaagtactggacccactggatcagacaggcccctggacaaagacctgagtggctgggagtgatcagccctcacttcgccagacctatctacagctacaagttccgggacagactgaccctgaccagagacagctctctgaccgccgtgtacctggaactgaagggcctgcagcctgacgacagcggcatctacttttgcgccagagatcccttcggcgacagggctccccactacaactaccacatggatgtgtggggaggcggcacagccgtgattgtgtcttccggcggcggaggaagcggaggcggaggttctggtggcggaggctcaggcggtggcggatctgaacctaagagcagcgacaagacccacacctgtcctccatgtcctgctccagaactgctggccggaccttccgtgttcctgtttcctccaaagcctaaggacaccctgatgatcagcagaacccctgaagtgacctgcgtggtggtggatgtgtctcacgaggaccctgaagtgaagttcaattggtacgtggacggcgtggaagtgcacaacgccaagaccaagcctagagaggaacagtacaacagcacctacagagtggtgtccgtgctgaccgtgctgcaccaggattggctgaacggcaaagagtacaagtgcaaggtgtccaacaaggccctgcctgcccctgaggaaaagaccatcagcaaggccaagggccagcctcgcgaacctcaagtctgtacactgcctcctagccgcgaggaaatgaccaagaaccaggtgtccctgagctgcgccgtgaagggcttttacccttccgatatcgccgtggaatgggagagcaatggccagcctgagaacaactacaagacaacccctcctgtgctggacagcgacggctcattcttcctggtgtccaagctgacagtggacaagagcagatggcagcagggcaacgtgttcagctgcagcgtgctgcatgaagccctgcacagccactacacccagaagtccctgtctctgagccccggcaagtgataaggatccgatctggtactgcatgcacgcaatgctagctgcccctttcccgtcctgggtaccccgagtctcccccgacctcgggtcccaggtatgctcccacctccacctgccccactcaccacctctgctagttccagacacctcccaagcacgcagcaatgcagctcaaaacgcttagcctagccacacccccacgggaaacagcagtgattaacctttagcaataaacgaaagtttaactaagctatactaaccccagggttggtcaatttcgtgccagccacaccctcgagctagcaaaaaaaaaaaaaaaaaaaaaaaaaaaaaagcatatgactaaaaaaaaaaaaaaaaaaaaaaaaaaaaaaaaaaaaaaaaaaaaaaaaaaaaaaaaaaaaaaaaaaaaaa

SEQ ID NO: 850 - RNA, 2072 nt, synthetic construct
  source 1..2072: mol_type = other RNA
agaataaactagtattcttctggtccccacagactcagagagaacccgccaccatggattggatttggagaatcctgttcctcgtgggcgccgctaccggagcccactccgaagtggtgctgacacagagccccgccatcctgagtgttagccctggcgatagagtgatcctgagctgcagagcctctcagggcctcgattcttctcacctggcctggtacagattcaagcggggacagatccccacactggtcatcttcggcaccagcaacagagccagaggcacccctgatagattttccggctctggcagcggagccgacttcaccctgacaatcagcagagtggaacccgaggacttcgccacctactactgccagagatacggcggcacccctatcacatttggcggcggaaccacactggacaagaaaggcggcggaggaagcggaggcggaggttctggtggtggtggctctggtggcggaggctcaggcggtggcggatctcaaggcagactgtttcagtctggcgccgaagtgaaaagaccaggcgcctctgtgcggatcagctgtagagccgacgacgacccctacaccgacgatgacaccttcaccaagtactggacccactggatcagacaggcccctggacaaagacctgagtggctgggagtgatcagccctcacttcgccagacctatctacagctacaagttccgggacagactgaccctgaccagagacagctctctgaccgccgtgtacctggaactgaagggcctgcagcctgacgacagcggcatctacttttgcgccagagatcccttcggcgacagggctccccactacaactaccacatggatgtgtggggaggcggcacagccgtgattgtgtcttccggcggcggaggaagcggaggcggaggttctggtggcggaggctcaggcggtggcggatctgaacctaagagcagcgacaagacccacacctgtcctccatgtcctgctccagaactgctcggcggaccttccgtgttcctgtttcctccaaagcctaaggacaccctgatgatcagcagaacccctgaagtgacctgcgtggtggtggatgtgtctcacgaggacccagaagtgaagttcaattggtacgtggacggcgtggaagtgcacaacgccaagaccaagcctagagaggaacagtacaacagcacctacagagtggtgtccgtgctgacagtgctgcaccaggattggctgaacggcaaagagtacaagtgcaaggtgtccaacaaggccctgcctgctcctatcgagaaaaccatcagcaaggccaagggccagcctagggaaccccaggtttacaccctgcctccatgccgcgaggaaatgaccaagaaccaggtgtccctgtggtgcctggtcaagggcttctacccttccgatatcgccgtggaatgggagagcaatggccagcctgagaacaactacaagacaacccctcctgtgctggacagcgacggctcattcttcctgtacagcaagctgacagtggacaagagcagatggcagcagggcaacgtgttcagctgcagcgtgctgcatgaagccctgcacagccactacacccagaagtccctgtctctgagccccggcaagtgataaggatccgatctggtactgcatgcacgcaatgctagctgcccctttcccgtcctgggtaccccgagtctcccccgacctcgggtcccaggtatgctcccacctccacctgccccactcaccacctctgctagttccagacacctcccaagcacgcagcaatgcagctcaaaacgcttagcctagccacacccccacgggaaacagcagtgattaacctttagcaataaacgaaagtttaactaagctatactaaccccagggttggtcaatttcgtgccagccacaccctcgagctagcaaaaaaaaaaaaaaaaaaaaaaaaaaaaaagcatatgactaaaaaaaaaaaaaaaaaaaaaaaaaaaaaaaaaaaaaaaaaaaaaaaaaaaaaaaaaaaaaaaaaaaaaa

SEQ ID NO: 851 - RNA, 2072 nt, synthetic construct
  source 1..2072: mol_type = other RNA
agaataaactagtattcttctggtccccacagactcagagagaacccgccaccatggattggatttggagaatcctgttcctcgtgggcgccgctaccggagcccactccgaagtggtgctgacacagagccccgccatcctgagtgttagccctggcgatagagtgatcctgagctgcagagcctctcagggcctcgattcttctcacctggcctggtacagattcaagcggggacagatccccacactggtcatcttcggcaccagcaacagagccagaggcacccctgatagattttccggctctggcagcggagccgacttcaccctgacaatcagcagagtggaacccgaggacttcgccacctactactgccagagatacggcggcacccctatcacatttggcggcggaaccacactggacaagaaaggcggcggaggaagcggaggcggaggttctggtggtggtggctctggtggcggaggctcaggcggtggcggatctcaaggcagactgtttcagtctggcgccgaagtgaaaagaccaggcgcctctgtgcggatcagctgtagagccgacgacgacccctacaccgacgatgacaccttcaccaagtactggacccactggatcagacaggcccctggacaaagacctgagtggctgggagtgatcagccctcacttcgccagacctatctacagctacaagttccgggacagactgaccctgaccagagacagctctctgaccgccgtgtacctggaactgaagggcctgcagcctgacgacagcggcatctacttttgcgccagagatcccttcggcgacagggctccccactacaactaccacatggatgtgtggggaggcggcacagccgtgattgtgtcttccggcggcggaggaagcggaggcggaggttctggtggcggaggctcaggcggtggcggatctgaacctaagagcagcgacaagacccacacctgtcctccatgtcctgctccagaactgctggccggaccttccgtgttcctgtttcctccaaagcctaaggacaccctgatgatcagcagaacccctgaagtgacctgcgtggtggtggatgtgtctcacgaggaccctgaagtgaagttcaattggtacgtggacggcgtggaagtgcacaacgccaagaccaagcctagagaggaacagtacaacagcacctacagagtggtgtccgtgctgaccgtgctgcaccaggattggctgaacggcaaagagtacaagtgcaaggtgtccaacaaggccctgcctctgcctgaggaaaagaccatcagcaaggccaagggccagcctagggaaccccaggtttacaccctgcctccatgccgcgaggaaatgaccaagaaccaggtgtccctgtggtgcctggtcaagggcttctacccttccgatatcgccgtggaatgggagagcaatggccagcctgagaacaactacaagacaacccctcctgtgctggacagcgacggctcattcttcctgtacagcaagctgacagtggacaagagcagatggcagcagggcaacgtgttcagctgcagcgtgctgcatgaagccctgcacagccactacacccagaagtccctgtctctgagccccggcaagtgataaggatccgatctggtactgcatgcacgcaatgctagctgcccctttcccgtcctgggtaccccgagtctcccccgacctcgggtcccaggtatgctcccacctccacctgccccactcaccacctctgctagttccagacacctcccaagcacgcagcaatgcagctcaaaacgcttagcctagccacacccccacgggaaacagcagtgattaacctttagcaataaacgaaagtttaactaagctatactaaccccagggttggtcaatttcgtgccagccacaccctcgagctagcaaaaaaaaaaaaaaaaaaaaaaaaaaaaaagcatatgactaaaaaaaaaaaaaaaaaaaaaaaaaaaaaaaaaaaaaaaaaaaaaaaaaaaaaaaaaaaaaaaaaaaaaa

SEQ ID NO: 852 - RNA, 2072 nt, synthetic construct
  source 1..2072: mol_type = other RNA
agaataaactagtattcttctggtccccacagactcagagagaacccgccaccatggattggatttggagaatcctgttcctcgtgggcgccgctaccggagcccactccgaagtggtgctgacacagagccccgccatcctgagtgttagccctggcgatagagtgatcctgagctgcagagcctctcagggcctcgattcttctcacctggcctggtacagattcaagcggggacagatccccacactggtcatcttcggcaccagcaacagagccagaggcacccctgatagattttccggctctggcagcggagccgacttcaccctgacaatcagcagagtggaacccgaggacttcgccacctactactgccagagatacggcggcacccctatcacatttggcggcggaaccacactggacaagaaaggcggcggaggaagcggaggcggaggttctggtggtggtggctctggtggcggaggctcaggcggtggcggatctcaaggcagactgtttcagtctggcgccgaagtgaaaagaccaggcgcctctgtgcggatcagctgtagagccgacgacgacccctacaccgacgatgacaccttcaccaagtactggacccactggatcagacaggcccctggacaaagacctgagtggctgggagtgatcagccctcacttcgccagacctatctacagctacaagttccgggacagactgaccctgaccagagacagctctctgaccgccgtgtacctggaactgaagggcctgcagcctgacgacagcggcatctacttttgcgccagagatcccttcggcgacagggctccccactacaactaccacatggatgtgtggggaggcggcacagccgtgattgtgtcttccggcggcggaggaagcggaggcggaggttctggtggcggaggctcaggcggtggcggatctgaacctaagagcagcgacaagacccacacctgtcctccatgtcctgctccagaactgctggccggaccttccgtgttcctgtttcctccaaagcctaaggacaccctgatgatcagcagaacccctgaagtgacctgcgtggtggtggatgtgtctcacgaggaccctgaagtgaagttcaattggtacgtggacggcgtggaagtgcacaacgccaagaccaagcctagagaggaacagtacaacagcacctacagagtggtgtccgtgctgaccgtgctgcaccaggattggctgaacggcaaagagtacaagtgcaaggtgtccaacaaggccctgcctgcccctgaggaaaagaccatcagcaaggccaagggccagcctagggaaccccaggtttacaccctgcctccatgccgcgaggaaatgaccaagaaccaggtgtccctgtggtgcctggtcaagggcttctacccttccgatatcgccgtggaatgggagagcaatggccagcctgagaacaactacaagacaacccctcctgtgctggacagcgacggctcattcttcctgtacagcaagctgacagtggacaagagcagatggcagcagggcaacgtgttcagctgcagcgtgctgcatgaagccctgcacagccactacacccagaagtccctgtctctgagccccggcaagtgataaggatccgatctggtactgcatgcacgcaatgctagctgcccctttcccgtcctgggtaccccgagtctcccccgacctcgggtcccaggtatgctcccacctccacctgccccactcaccacctctgctagttccagacacctcccaagcacgcagcaatgcagctcaaaacgcttagcctagccacacccccacgggaaacagcagtgattaacctttagcaataaacgaaagtttaactaagctatactaaccccagggttggtcaatttcgtgccagccacaccctcgagctagcaaaaaaaaaaaaaaaaaaaaaaaaaaaaaagcatatgactaaaaaaaaaaaaaaaaaaaaaaaaaaaaaaaaaaaaaaaaaaaaaaaaaaaaaaaaaaaaaaaaaaaaaa

SEQ ID NO: 853 - RNA, 2072 nt, synthetic construct; identical to SEQ ID NO: 847
  source 1..2072: mol_type = other RNA

SEQ ID NO: 854 - RNA, 2072 nt, synthetic construct; identical to SEQ ID NO: 848
  source 1..2072: mol_type = other RNA

SEQ ID NO: 855 - RNA, 2072 nt, synthetic construct; identical to SEQ ID NO: 849
  source 1..2072: mol_type = other RNA

SEQ ID NO: 856 - RNA, 2072 nt, synthetic construct; identical to SEQ ID NO: 850
  source 1..2072: mol_type = other RNA

SEQ ID NO: 857 - RNA, 2072 nt, synthetic construct; identical to SEQ ID NO: 851
  source 1..2072: mol_type = other RNA

SEQ ID NO: 858 - RNA, 2072 nt, synthetic construct; identical to SEQ ID NO: 852
  source 1..2072: mol_type = other RNA

SEQ ID NO: 859 - RNA, 2072 nt, synthetic construct
  source 1..2072: mol_type = other RNA
agaataaactagtattcttctggtccccacagactcagagagaacccgccaccatggattggatttggagaatcctgttcctcgtgggcgccgctaccggagcccactccgaagtggtgctgacacagagccccgccatcctgagtgttagccctggcgatagagtgatcctgagctgcagagcctctcagggcctcgattcttctcacctggcctggtacagattcaagcggggacagatccccacactggtcatcttcggcaccagcaacagagccagaggcacccctgatagattttccggctctggcagcggagccgacttcaccctgacaatcagcagagtggaacccgaggacttcgccacctactactgccagagatacggcggcacccctatcacatttggcggcggaaccacactggacaagaaaggcggcggaggaagcggaggcggaggttctggtggtggtggctctggtggcggaggctcaggcggtggcggatctcaaggcagactgtttcagtctggcgccgaagtgaaaagaccaggcgcctctgtgcggatcagctgtagagccgacgacgacccctacaccgacgatgacaccttcaccaagtactggacccactggatcagacaggcccctggacaaagacctgagtggctgggagtgatcagccctcacttcgccagacctatctacagctacaagttccgggacagactgaccctgaccagagacagctctctgaccgccgtgtacctggaactgaagggcctgcagcctgacgacagcggcatctacttttgcgccagagatcccttcggcgacagggctccccactacaactaccacatggatgtgtggggaggcggcacagccgtgattgtgtcttccggcggcggaggaagcggaggcggaggttctggtggcggaggctcaggcggtggcggatctgaacctaagagcagcgacaagacccacacctgtcctccatgtcctgctccagaactgctcggcggaccttccgtgttcctgtttcctccaaagcctaaggacaccctgatgatcagcagaacccctgaagtgacctgcgtggtggtggatgtgtctcacgaggacccagaagtgaagttcaattggtacgtggacggcgtggaagtgcacaacgccaagaccaagcctagagaggaacagtacaacagcacctacagagtggtgtccgtgctgacagtgctgcaccaggattggctgaacggcaaagagtacaagtgcaaggtgtccaacaaggccctgcctgctcctatcgagaaaaccatcagcaaggccaagggccagcctcgcgaacctcaagtctgtacactgcctcctagccgcgacgaactgaccaagaaccaggtgtccctgagctgcgccgtgaagggcttttacccttccgatatcgccgtggaatgggagagcaatggccagcctgagaacaactacaagacaacccctcctgtgctggacagcgacggctcattcttcctggtgtccaagctgacagtggacaagagcagatggcagcagggcaacgtgttcagctgcagcgtgctgcatgaagccctgcacagccactacacccagaagtccctgtctctgagccccggcaagtgataaggatccgatctggtactgcatgcacgcaatgctagctgcccctttcccgtcctgggtaccccgagtctcccccgacctcgggtcccaggtatgctcccacctccacctgccccactcaccacctctgctagttccagacacctcccaagcacgcagcaatgcagctcaaaacgcttagcctagccacacccccacgggaaacagcagtgattaacctttagcaataaacgaaagtttaactaagctatactaaccccagggttggtcaatttcgtgccagccacaccctcgagctagcaaaaaaaaaaaaaaaaaaaaaaaaaaaaaagcatatgactaaaaaaaaaaaaaaaaaaaaaaaaaaaaaaaaaaaaaaaaaaaaaaaaaaaaaaaaaaaaaaaaaaaaaa

SEQ ID NO: 860 - RNA, 2072 nt, synthetic construct
  source 1..2072: mol_type = other RNA
agaataaactagtattcttctggtccccacagactcagagagaacccgccaccatggattggatttggagaatcctgttcctcgtgggcgccgctaccggagcccactccgaagtggtgctgacacagagccccgccatcctgagtgttagccctggcgatagagtgatcctgagctgcagagcctctcagggcctcgattcttctcacctggcctggtacagattcaagcggggacagatccccacactggtcatcttcggcaccagcaacagagccagaggcacccctgatagattttccggctctggcagcggagccgacttcaccctgacaatcagcagagtggaacccgaggacttcgccacctactactgccagagatacggcggcacccctatcacatttggcggcggaaccacactggacaagaaaggcggcggaggaagcggaggcggaggttctggtggtggtggctctggtggcggaggctcaggcggtggcggatctcaaggcagactgtttcagtctggcgccgaagtgaaaagaccaggcgcctctgtgcggatcagctgtagagccgacgacgacccctacaccgacgatgacaccttcaccaagtactggacccactggatcagacaggcccctggacaaagacctgagtggctgggagtgatcagccctcacttcgccagacctatctacagctacaagttccgggacagactgaccctgaccagagacagctctctgaccgccgtgtacctggaactgaagggcctgcagcctgacgacagcggcatctacttttgcgccagagatcccttcggcgacagggctccccactacaactaccacatggatgtgtggggaggcggcacagccgtgattgtgtcttccggcggcggaggaagcggaggcggaggttctggtggcggaggctcaggcggtggcggatctgaacctaagagcagcgacaagacccacacctgtcctccatgtcctgctccagaactgctggccggaccttccgtgttcctgtttcctccaaagcctaaggacaccctgatgatcagcagaacccctgaagtgacctgcgtggtggtggatgtgtctcacgaggaccctgaagtgaagttcaattggtacgtggacggcgtggaagtgcacaacgccaagaccaagcctagagaggaacagtacaacagcacctacagagtggtgtccgtgctgaccgtgctgcaccaggattggctgaacggcaaagagtacaagtgcaaggtgtccaacaaggccctgcctctgcctgaggaaaagaccatcagcaaggccaagggccagcctcgcgaacctcaagtctgtacactgcctcctagccgcgacgaactgaccaagaaccaggtgtccctgagctgcgccgtgaagggcttttacccttccgatatcgccgtggaatgggagagcaatggccagcctgagaacaactacaagacaacccctcctgtgctggacagcgacggctcattcttcctggtgtccaagctgacagtggacaagagcagatggcagcagggcaacgtgttcagctgcagcgtgctgcatgaagccctgcacagccactacacccagaagtccctgtctctgagccccggcaagtgataaggatccgatctggtactgcatgcacgcaatgctagctgcccctttcccgtcctgggtaccccgagtctcccccgacctcgggtcccaggtatgctcccacctccacctgccccactcaccacctctgctagttccagacacctcccaagcacgcagcaatgcagctcaaaacgcttagcctagccacacccccacgggaaacagcagtgattaacctttagcaataaacgaaagtttaactaagctatactaaccccagggttggtcaatttcgtgccagccacaccctcgagctagcaaaaaaaaaaaaaaaaaaaaaaaaaaaaaagcatatgactaaaaaaaaaaaaaaaaaaaaaaaaaaaaaaaaaaaaaaaaaaaaaaaaaaaaaaaaaaaaaaaaaaaaaa

SEQ ID NO: 861 - RNA, 2072 nt, synthetic construct
  source 1..2072: mol_type = other RNA
agaataaactagtattcttctggtccccacagactcagagagaacccgccaccatggattggatttggagaatcctgttcctcgtgggcgccgctaccggagcccactccgaagtggtgctgacacagagccccgccatcctgagtgttagccctggcgatagagtgatcctgagctgcagagcctctcagggcctcgattcttctcacctggcctggtacagattcaagcggggacagatccccacactggtcatcttcggcaccagcaacagagccagaggcacccctgatagattttccggctctggcagcggagccgacttcaccctgacaatcagcagagtggaacccgaggacttcgccacctactactgccagagatacggcggcacccctatcacatttggcggcggaaccacactggacaagaaaggcggcggaggaagcggaggcggaggttctggtggtggtggctctggtggcggaggctcaggcggtggcggatctcaaggcagactgtttcagtctggcgccgaagtgaaaagaccaggcgcctctgtgcggatcagctgtagagccgacgacgacccctacaccgacgatgacaccttcaccaagtactggacccactggatcagacaggcccctggacaaagacctgagtggctgggagtgatcagccctcacttcgccagacctatctacagctacaagttccgggacagactgaccctgaccagagacagctctctgaccgccgtgtacctggaactgaagggcctgcagcctgacgacagcggcatctacttttgcgccagagatcccttcggcgacagggctccccactacaactaccacatggatgtgtggggaggcggcacagccgtgattgtgtcttccggcggcggaggaagcggaggcggaggttctggtggcggaggctcaggcggtggcggatctgaacctaagagcagcgacaagacccacacctgtcctccatgtcctgctccagaactgctggccggaccttccgtgttcctgtttcctccaaagcctaaggacaccctgatgatcagcagaacccctgaagtgacctgcgtggtggtggatgtgtctcacgaggaccctgaagtgaagttcaattggtacgtggacggcgtggaagtgcacaacgccaagaccaagcctagagaggaacagtacaacagcacctacagagtggtgtccgtgctgaccgtgctgcaccaggattggctgaacggcaaagagtacaagtgcaaggtgtccaacaaggccctgcctgcccctgaggaaaagaccatcagcaaggccaagggccagcctcgcgaacctcaagtctgtacactgcctcctagccgcgacgaactgaccaagaaccaggtgtccctgagctgcgccgtgaagggcttttacccttccgatatcgccgtggaatgggagagcaatggccagcctgagaacaactacaagacaacccctcctgtgctggacagcgacggctcattcttcctggtgtccaagctgacagtggacaagagcagatggcagcagggcaacgtgttcagctgcagcgtgctgcatgaagccctgcacagccactacacccagaagtccctgtctctgagccccggcaagtgataaggatccgatctggtactgcatgcacgcaatgctagctgcccctttcccgtcctgggtaccccgagtctcccccgacctcgggtcccaggtatgctcccacctccacctgccccactcaccacctctgctagttccagacacctcccaagcacgcagcaatgcagctcaaaacgcttagcctagccacacccccacgggaaacagcagtgattaacctttagcaataaacgaaagtttaactaagctatactaaccccagggttggtcaatttcgtgccagccacaccctcgagctagcaaaaaaaaaaaaaaaaaaaaaaaaaaaaaagcatatgactaaaaaaaaaaaaaaaaaaaaaaaaaaaaaaaaaaaaaaaaaaaaaaaaaaaaaaaaaaaaaaaaaaaaaa

SEQ ID NO: 862 - RNA, 2072 nt, synthetic construct
  source 1..2072: mol_type = other RNA
agaataaactagtattcttctggtccccacagactcagagagaacccgccaccatggattggatttggagaatcctgttcctcgtgggcgccgctaccggagcccactccgaagtggtgctgacacagagccccgccatcctgagtgttagccctggcgatagagtgatcctgagctgcagagcctctcagggcctcgattcttctcacctggcctggtacagattcaagcggggacagatccccacactggtcatcttcggcaccagcaacagagccagaggcacccctgatagattttccggctctggcagcggagccgacttcaccctgacaatcagcagagtggaacccgaggacttcgccacctactactgccagagatacggcggcacccctatcacatttggcggcggaaccacactggacaagaaaggcggcggaggaagcggaggcggaggttctggtggtggtggctctggtggcggaggctcaggcggtggcggatctcaaggcagactgtttcagtctggcgccgaagtgaaaagaccaggcgcctctgtgcggatcagctgtagagccgacgacgacccctacaccgacgatgacaccttcaccaagtactggacccactggatcagacaggcccctggacaaagacctgagtggctgggagtgatcagccctcacttcgccagacctatctacagctacaagttccgggacagactgaccctgaccagagacagctctctgaccgccgtgtacctggaactgaagggcctgcagcctgacgacagcggcatctacttttgcgccagagatcccttcggcgacagggctccccactacaactaccacatggatgtgtggggaggcggcacagccgtgattgtgtcttccggcggcggaggaagcggaggcggaggttctggtggcggaggctcaggcggtggcggatctgaacctaagagcagcgacaagacccacacctgtcctccatgtcctgctccagaactgctcggcggaccttccgtgttcctgtttcctccaaagcctaaggacaccctgatgatcagcagaacccctgaagtgacctgcgtggtggtggatgtgtctcacgaggacccagaagtgaagttcaattggtacgtggacggcgtggaagtgcacaacgccaagaccaagcctagagaggaacagtacaacagcacctacagagtggtgtccgtgctgacagtgctgcaccaggattggctgaacggcaaagagtacaagtgcaaggtgtccaacaaggccctgcctgctcctatcgagaaaaccatcagcaaggccaagggccagcctagggaaccccaggtttacaccctgcctccatgccgcgacgaactgaccaagaaccaggtgtccctgtggtgcctggtcaagggcttctacccttccgatatcgccgtggaatgggagagcaatggccagcctgagaacaactacaagacaacccctcctgtgctggacagcgacggctcattcttcctgtacagcaagctgacagtggacaagagcagatggcagcagggcaacgtgttcagctgcagcgtgctgcatgaagccctgcacagccactacacccagaagtccctgtctctgagccccggcaagtgataaggatccgatctggtactgcatgcacgcaatgctagctgcccctttcccgtcctgggtaccccgagtctcccccgacctcgggtcccaggtatgctcccacctccacctgccccactcaccacctctgctagttccagacacctcccaagcacgcagcaatgcagctcaaaacgcttagcctagccacacccccacgggaaacagcagtgattaacctttagcaataaacgaaagtttaactaagctatactaaccccagggttggtcaatttcgtgccagccacaccctcgagctagcaaaaaaaaaaaaaaaaaaaaaaaaaaaaaagcatatgactaaaaaaaaaaaaaaaaaaaaaaaaaaaaaaaaaaaaaaaaaaaaaaaaaaaaaaaaaaaaaaaaaaaaaa

SEQ ID NO: 863 - RNA, 2072 nt, synthetic construct
  source 1..2072: mol_type = other RNA
agaataaactagtattcttctggtccccacagactcagagagaacccgccaccatggattggatttggagaatcctgttcctcgtgggcgccgctaccggagcccactccgaagtggtgctgacacagagccccgccatcctgagtgttagccctggcgatagagtgatcctgagctgcagagcctctcagggcctcgattcttctcacctggcctggtacagattcaagcggggacagatccccacactggtcatcttcggcaccagcaacagagccagaggcacccctgatagattttccggctctggcagcggagccgacttcaccctgacaatcagcagagtggaacccgaggacttcgccacctactactgccagagatacggcggcacccctatcacatttggcggcggaaccacactggacaagaaaggcggcggaggaagcggaggcggaggttctggtggtggtggctctggtggcggaggctcaggcggtggcggatctcaaggcagactgtttcagtctggcgccgaagtgaaaagaccaggcgcctctgtgcggatcagctgtagagccgacgacgacccctacaccgacgatgacaccttcaccaagtactggacccactggatcagacaggcccctggacaaagacctgagtggctgggagtgatcagccctcacttcgccagacctatctacagctacaagttccgggacagactgaccctgaccagagacagctctctgaccgccgtgtacctggaactgaagggcctgcagcctgacgacagcggcatctacttttgcgccagagatcccttcggcgacagggctccccactacaactaccacatggatgtgtggggaggcggcacagccgtgattgtgtcttccggcggcggaggaagcggaggcggaggttctggtggcggaggctcaggcggtggcggatctgaacctaagagcagcgacaagacccacacctgtcctccatgtcctgctccagaactgctggccggaccttccgtgttcctgtttcctccaaagcctaaggacaccctgatgatcagcagaacccctgaagtgacctgcgtggtggtggatgtgtctcacgaggaccctgaagtgaagttcaattggtacgtggacggcgtggaagtgcacaacgccaagaccaagcctagagaggaacagtacaacagcacctacagagtggtgtccgtgctgaccgtgctgcaccaggattggctgaacggcaaagagtacaagtgcaaggtgtccaacaaggccctgcctctgcctgaggaaaagaccatcagcaaggccaagggccagcctagggaaccccaggtttacaccctgcctccatgccgcgacgaactgaccaagaaccaggtgtccctgtggtgcctggtcaagggcttctacccttccgatatcgccgtggaatgggagagcaatggccagcctgagaacaactacaagacaacccctcctgtgctggacagcgacggctcattcttcctgtacagcaagctgacagtggacaagagcagatggcagcagggcaacgtgttcagctgcagcgtgctgcatgaagccctgcacagccactacacccagaagtccctgtctctgagccccggcaagtgataaggatccgatctggtactgcatgcacgcaatgctagctgcccctttcccgtcctgggtaccccgagtctcccccgacctcgggtcccaggtatgctcccacctccacctgccccactcaccacctctgctagttccagacacctcccaagcacgcagcaatgcagctcaaaacgcttagcctagccacacccccacgggaaacagcagtgattaacctttagcaataaacgaaagtttaactaagctatactaaccccagggttggtcaatttcgtgccagccacaccctcgagctagcaaaaaaaaaaaaaaaaaaaaaaaaaaaaaagcatatgactaaaaaaaaaaaaaaaaaaaaaaaaaaaaaaaaaaaaaaaaaaaaaaaaaaaaaaaaaaaaaaaaaaaaaa

SEQ ID NO: 864 - RNA, 2072 nt, synthetic construct
  source 1..2072: mol_type = other RNA
agaataaactagtattcttctggtccccacagactcagagagaacccgccaccatggattggatttggagaatcctgttcctcgtgggcgccgctaccggagcccactccgaagtggtgctgacacagagccccgccatcctgagtgttagccctggcgatagagtgatcctgagctgcagagcctctcagggcctcgattcttctcacctggcctggtacagattcaagcggggacagatccccacactggtcatcttcggcaccagcaacagagccagaggcacccctgatagattttccggctctggcagcggagccgacttcaccctgacaatcagcagagtggaacccgaggacttcgccacctactactgccagagatacggcggcacccctatcacatttggcggcggaaccacactggacaagaaaggcggcggaggaagcggaggcggaggttctggtggtggtggctctggtggcggaggctcaggcggtggcggatctcaaggcagactgtttcagtctggcgccgaagtgaaaagaccaggcgcctctgtgcggatcagctgtagagccgacgacgacccctacaccgacgatgacaccttcaccaagtactggacccactggatcagacaggcccctggacaaagacctgagtggctgggagtgatcagccctcacttcgccagacctatctacagctacaagttccgggacagactgaccctgaccagagacagctctctgaccgccgtgtacctggaactgaagggcctgcagcctgacgacagcggcatctacttttgcgccagagatcccttcggcgacagggctccccactacaactaccacatggatgtgtggggaggcggcacagccgtgattgtgtcttccggcggcggaggaagcggaggcggaggttctggtggcggaggctcaggcggtggcggatctgaacctaagagcagcgacaagacccacacctgtcctccatgtcctgctccagaactgctggccggaccttccgtgttcctgtttcctccaaagcctaaggacaccctgatgatcagcagaacccctgaagtgacctgcgtggtggtggatgtgtctcacgaggaccctgaagtgaagttcaattggtacgtggacggcgtggaagtgcacaacgccaagaccaagcctagagaggaacagtacaacagcacctacagagtggtgtccgtgctgaccgtgctgcaccaggattggctgaacggcaaagagtacaagtgcaaggtgtccaacaaggccctgcctgcccctgaggaaaagaccatcagcaaggccaagggccagcctagggaaccccaggtttacaccctgcctccatgccgcgacgaactgaccaagaaccaggtgtccctgtggtgcctggtcaagggcttctacccttccgatatcgccgtggaatgggagagcaatggccagcctgagaacaactacaagacaacccctcctgtgctggacagcgacggctcattcttcctgtacagcaagctgacagtggacaagagcagatggcagcagggcaacgtgttcagctgcagcgtgctgcatgaagccctgcacagccactacacccagaagtccctgtctctgagccccggcaagtgataaggatccgatctggtactgcatgcacgcaatgctagctgcccctttcccgtcctgggtaccccgagtctcccccgacctcgggtcccaggtatgctcccacctccacctgccccactcaccacctctgctagttccagacacctcccaagcacgcagcaatgcagctcaaaacgcttagcctagccacacccccacgggaaacagcagtgattaacctttagcaataaacgaaagtttaactaagctatactaaccccagggttggtcaatttcgtgccagccacaccctcgagctagcaaaaaaaaaaaaaaaaaaaaaaaaaaaaaagcatatgactaaaaaaaaaaaaaaaaaaaaaaaaaaaaaaaaaaaaaaaaaaaaaaaaaaaaaaaaaaaaaaaaaaaaaa

SEQ ID NO: 865 - protein, 98 aa, synthetic construct
ASTKGPSVFPLAPSSKSTSGGTAALGCLVEDYFPEPVTVSWNSGALTSGVHTFPAVLQSSGLYSLSSVVTVPSSSLGTQTYICNVNHKPSNTKVDDKV

SEQ ID NO: 866 - RNA, 294 nt, synthetic construct
  source 1..294: mol_type = other RNA
gcttccacaaagggccctagcgtgttccctctggctcctagcagcaagtctacaagcggaggaacagctgccctgggctgcctggtggaagattactttcctgagcctgtgaccgtgtcctggaacagcggtgctctgacttctggcgtgcacacctttccagccgtgctgcaaagcagcggcctgtactctctgagcagcgtggtcacagtgccaagctctagcctgggcacccagacctacatctgcaatgtgaaccacaagcctagcaacaccaaggtggacgacaaggtg

SEQ ID NO: 867 - protein, 27 aa, Human alphaherpesvirus 1
MGGAAARLGAVILFVVIVGLHGVRSKY

SEQ ID NO: 868 - protein, 25 aa, Human alphaherpesvirus 2
MGRLTSGVGTAALLVVAVGLRVVCA

SEQ ID NO: 869 - protein, 28 aa, Human alphaherpesvirus 2
MGRLTSGVGTAALLVVAVGLRVVCAKYA

SEQ ID NO: 870 - protein, 19 aa, unidentified
  source 1..19: note = Severe acute respiratory syndrome coronavirus 2
MFVFLVLLPLVSSQCVNLT

SEQ ID NO: 871 - protein, 21 aa, Homo sapiens
MDWIWRILFLVGAATGAHSQM

SEQ ID NO: 872 - protein, 19 aa, Homo sapiens
MDWTWRVFCLLAVAPGAHS

SEQ ID NO: 873 - protein, 20 aa, Homo sapiens
METPAQLLFLLLLWLPDTTG

SEQ ID NO: 874 - protein, 18 aa, synthetic construct
MDWTWILFLVAAATRVHS

SEQ ID NO: 875 - protein, 24 aa, Japanese encephalitis virus
MLGSNSGQRVVFTILLLLVAPAYS

SEQ ID NO: 876 - protein, 17 aa, Vesiculovirus indiana
MKCLLYLAFLFIGVNCA

SEQ ID NO: 877 - protein, 18 aa, synthetic construct
MDWTWILFLVAAATRVHS

SEQ ID NO: 878 - protein, 19 aa, synthetic construct
ETPAQLLFLLLLWLPDTTG

SEQ ID NO: 879 - protein, 24 aa, synthetic construct
MLGSNSGQRVVFTILLLLVAPAYS

SEQ ID NO: 880 - protein, 17 aa, synthetic construct
MKCLLYLAFLFIGVNCA

SEQ ID NO: 881 - protein, 15 aa, synthetic construct
MWLVSLAIVTACAGA

SEQ ID NO: 882 - protein, 15 aa, synthetic construct
MFVFLVLLPLVSSQC

SEQ ID NO: 883 - protein, 26 aa, synthetic construct
MRVMAPRTLILLLSGALALTETWAGS

SEQ ID NO: 884 - RNA, 78 nt, synthetic construct
  source 1..78: mol_type = other RNA
atgagagtgatggcccccagaaccctgatcctgctgctgtctggcgccctggccctgacagagacatgggccggaagc

SEQ ID NO: 885 - DNA, 78 bp, synthetic construct
  source 1..78: mol_type = other DNA
atgagagtgatggcccccagaaccctgatcctgctgctgtctggcgccctggccctgacagagacatgggccggaagc

SEQ ID NO: 886 - protein, 19 aa, synthetic construct
MEFGLSWLFLVAILKGVQC

SEQ ID NO: 887 - RNA, 57 nt, synthetic construct
  source 1..57: mol_type = other RNA
atggagtttgggctgagctggctttttcttgtggctattttaaaaggcgtacagtgc

SEQ ID NO: 888 - DNA, 57 bp, synthetic construct
  source 1..57: mol_type = other DNA
atggagtttgggctgagctggctttttcttgtggctattttaaaaggcgtacagtgc

SEQ ID NO: 889 - protein, 5 aa, synthetic construct
EPKSC

SEQ ID NO: 890 - protein, 5 aa, synthetic construct
  REGION >5: note = The entire sequence of amino acids 1-5 can be repeated one or more times
GSGGS

SEQ ID NO: 891 - protein, 5 aa, synthetic construct
  REGION >5: note = The entire sequence of amino acids 1-5 can be repeated one or more times
GGGGS

1. A composition comprising:
a first polyribonucleotide encoding an immunoglobulin chain, wherein the immunoglobulin chain comprises a heavy chain variable (VH) domain that comprises:
(a) a heavy chain complementarity determining region (HCDR)1 comprising an amino acid sequence according to SEQ ID NO: 6;
(b) an HCDR2 comprising an amino acid sequence according to SEQ ID NO: 9; and
(c) an HCDR3 comprising an amino acid sequence according to SEQ ID NO: 12; and
a second polyribonucleotide encoding an immunoglobulin chain, wherein the immunoglobulin chain comprises a light chain variable (VL) domain that comprises:
(a) a light chain complementarity determining region (LCDR)1 comprising an amino acid sequence according to SEQ ID NO: 15;
(b) an LCDR2 comprising an amino acid sequence according to SEQ ID NO: 18 (GTS); and
(c) an LCDR3 comprising an amino acid sequence according to SEQ ID NO: 21.

2. (canceled)

3. The composition of claim 1, wherein the VH domain comprises or consists of an amino acid sequence according to SEQ ID NO: 24.

4. (canceled)

5. The composition of claim 1, wherein the VL domain comprises or consists of an amino acid sequence according to SEQ ID NO: 29.

6. (canceled)

7. The composition of claim 1, wherein:
(i) the immunoglobulin chain encoded by the first polyribonucleotide comprises the VH domain operably linked to, in order, a CH1 domain, a hinge domain, a CH2 domain, and a CH3 domain, and/or
(ii) the immunoglobulin chain encoded by the second polyribonucleotide comprises the VL domain operably linked to a CL constant domain.

8. (canceled)

9. The composition of claim 7, wherein the CH2 domain comprises or consists of an amino acid sequence according to SEQ ID NO: 53.

10-12. (canceled)

13. The composition of claim 7, wherein the hinge domain comprises or consists of an amino acid sequence according to SEQ ID NO: 104.

14. (canceled)

15. The composition of claim 7, wherein the CL domain comprises or consists of an amino acid sequence according to SEQ ID NO: 92.

16. (canceled)

17. The composition of claim 7, wherein the CH1 domain comprises or consists of an amino acid sequence according to SEQ ID NO: 38.

18. (canceled)

19. The composition of claim 7, wherein the CH1 domain comprises one or more substitution mutations, the one or more substitution mutations comprise or consist of K147E, K213D, or a combination thereof, and the substitution mutation positions are according to EU numbering.

20. The composition of claim 7, wherein the CL domain comprises one or more substitution mutations, the one or more substitution mutations comprise or consist of R108A, T109S, E123K, E123R, Q124K, Q124E, Q124R, or a combination thereof, and the substitution mutation positions are according to EU numbering.

21-23. (canceled)

24. The composition of claim 7, wherein the immunoglobulin chain encoded by the first polyribonucleotide comprises a CH1 domain that comprises one or more substitution mutations that comprise or consist of K147E and K213D, the immunoglobulin chain encoded by the second polyribonucleotide comprises a CL domain that comprises one or more substitution mutations that comprise or consist of E123K and Q124R or E123R and Q124K, and the substitution mutation positions are according to EU numbering.

25. The composition of claim 24, wherein the immunoglobulin chain encoded by the second polyribonucleotide comprises a CL domain that comprises or consists of an amino acid sequence according to SEQ ID NO: 98.

26. (canceled)

27. The composition of claim 24, wherein the immunoglobulin chain encoded by the first polyribonucleotide comprises a CH1 domain that comprises or consists of an amino acid sequence according to SEQ ID NO: 50.

28-41. (canceled)

42. The composition of claim 7, wherein the CH3 domain comprises one or more substitution mutations, the one or more substitution mutations comprise or consist of M428L and N434S, and the substitution mutation positions are according to EU numbering.

43. The composition of claim 42, wherein the CH3 domain comprises or consists of an amino acid sequence according to SEQ ID NO: 74.

44-45. (canceled)

46. The composition of claim 1, wherein the immunoglobulin chain encoded by the first polyribonucleotide comprises or consists of an amino acid sequence according to SEQ ID NO: 617, or an amino acid sequence that has at least 90% identity to SEQ ID NO: 617.

47. (canceled)

48. The composition of claim 1, wherein the immunoglobulin chain encoded by the first polyribonucleotide comprises an immunoglobulin chain that comprises or consists of an amino acid sequence according to SEQ ID NO: 635, or an amino acid sequence that has at least 90% identity to SEQ ID NO: 635.

49-53. (canceled)

54. The composition of claim 1, wherein the immunoglobulin chain encoded by the second polyribonucleotide comprises an immunoglobulin chain that comprises or consists of an amino acid sequence according to SEQ ID NO: 638, or an amino acid sequence that has at least 90% identity to SEQ ID NO: 638.

55. (canceled)

56. The composition of claim 1, wherein the immunoglobulin chain encoded by the second polyribonucleotide comprises an immunoglobulin chain that comprises or consists of an amino acid sequence according to SEQ ID NO: 620, or an amino acid sequence that has at least 90% identity to SEQ ID NO: 620.

57-86. (canceled)

87. The composition of claim 1, wherein the composition further comprises lipid nanoparticles, polyplexes (PLX), lipidated polyplexes (LPLX), or liposomes,
wherein the one or more polyribonucleotides are fully or partially encapsulated within the lipid nanoparticles, polyplexes (PLX), lipidated polyplexes (LPLX), or liposomes.

88. The composition of claim 1, wherein the composition further comprises lipid nanoparticles,
wherein the polyribonucleotides are encapsulated within the lipid nanoparticles.

89-100. (canceled)

101. The composition of claim 1, wherein
(a) the first polyribonucleotide comprises or consists of a polyribonucleotide that encodes an immunoglobulin chain that has at least 90% identity to SEQ ID NO: 617, and/or comprises or consists of a ribonucleic acid sequence that has at least 90% identity to SEQ ID NO: 616, and/or
(b) the second polyribonucleotide comprises or consists of a polyribonucleotide that encodes an immunoglobulin chain that has at least 90% identity to SEQ ID NO: 620, and/or comprises or consists of a ribonucleic acid sequence that has at least 90% identity to SEQ ID NO: 619.

102. The composition of claim 1, wherein
(a) the first polyribonucleotide comprises or consists of a polyribonucleotide that encodes an immunoglobulin chain that comprises an amino acid sequence that has at least 90% identity to SEQ ID NO: 635 and/or comprises a ribonucleic acid sequence that has at least 90% identity to SEQ ID NO: 634, and/or
(b) the second polyribonucleotide comprises or consists of a polyribonucleotide that encodes an immunoglobulin chain that comprises San amino acid sequence that has at least 90% identity to SEQ ID NO: 638 and/or comprises a ribonucleic acid sequence that has at least 90% identity to SEQ ID NO: 637.

103. An antibody agent comprising the immunoglobulin chains encoded by the first and second polynucleotides comprised within the composition of claim 1.

104. A composition comprising:
(i) a first immunoglobulin chain, wherein the first immunoglobulin chain comprises a VH domain that comprises an HCDR1, HCDR2, and HCDR3 comprising the amino acid sequences of SEQ ID NO: 6, SEQ ID NO: 9, and SEQ ID NO: 12, respectively, wherein the first immunoglobulin chain comprises the VH domain operably linked to, in order, a CH1 domain, a hinge domain, and a CH3 domain, wherein the CH3 domain comprises one or more substitution mutations comprising M428L and N434S, according to the EU numbering scheme; and
(ii) a second immunoglobulin chain, wherein the second immunoglobulin chain comprises a VL domain that comprises an LCDR1, LCDR2, and LCDR3 comprising the amino acid sequences of SEQ ID NO: 15, SEQ ID NO: 18, and SEQ ID NO: 21, respectively, wherein the second immunoglobulin chain comprises the VL domain operably linked to a light chain constant domain (CL).

105. The composition of claim 104, wherein the first immunoglobulin chain comprises an amino acid sequence that has at least 90% identity to SEQ ID NO: 617.

106. The composition of claim 104, wherein the second immunoglobulin chain comprises an amino acid sequence that has at least 90% identity to SEQ ID NO: 620.

107. A pharmaceutical composition comprising the composition of claim 1 and at least one pharmaceutically acceptable excipient.

108. The pharmaceutical composition of claim 107 for use in the treatment of HIV comprising administering the pharmaceutical composition to a subject.

109. The pharmaceutical composition of claim 107 for use in the prevention of HIV comprising administering the pharmaceutical composition to a subject.

110. A method comprising administering the pharmaceutical composition of claim 107 to a subject.

111. The method of claim 110, wherein administering the pharmaceutical composition to the subject results in expression of the immunoglobulin chains in the subject.

112. A method of producing an antibody agent comprising administering to cells the composition of claim 1 so that the cells express and secrete the antibody agent.

113. An antibody agent produced by the method of claim 112.

114. A method of manufacture, the method comprising steps of:
(a) determining one or more features of the composition of claim 1, which one or more features comprise or consist of:
(i) length and/or sequence of the polyribonucleotide;
(ii) integrity of the polyribonucleotide;
(iii) presence and/or location of one or more chemical moieties of the polyribonucleotide;
(iv) extent of expression of the antibody agent when the polyribonucleotide is introduced into a cell;
(v) stability of the polyribonucleotide or composition thereof;
(vi) level of antibody agent in a biological sample from an organism into which the polyribonucleotide has been introduced;
(vii) binding specificity of the antibody agent expressed from the polyribonucleotide, optionally to a CD4 binding site of HIV;
(viii) efficacy of the antibody agent to mediate target cell death through ADCC;
(ix) efficacy of the antibody agent to mediate target cell death through complement dependent cytotoxicity (CDC);
(x) lipid identity and amount/concentration within the composition;
(xi) size of lipid nanoparticles within the composition;
(xii) polydispersity of lipid nanoparticles within the composition;
(xiii) amount/concentration of the polyribonucleotide within the composition;
(xiv) extent of encapsulation of the polyribonucleotide within lipid nanoparticles;
(xv) a level of double stranded RNA; and
(xvi) combinations thereof;
(b) comparing the one or more features of the polyribonucleotide with that of an appropriate reference standard; and
(c) (i) designating the polyribonucleotide or composition thereof for one or more further steps of manufacturing and/or distribution if the comparison demonstrates that the polyribonucleotide or composition thereof meets or exceeds the reference standard; or
(ii) taking an alternative action if the comparison demonstrates that the polyribonucleotide or composition thereof does not meet or exceed the reference standard.
